(19) United States
(12) Patent Application Publication
(10) Pub. No.: US 2006/0199226 A1
(43) Pub. Date: Sep. 7, 2006

(54) Functional bioluminescence energy resonance transfer (BRET) assay to screen, identify and characterize receptor tyrosine kinase ligands

(76) Inventor: Hans H. Schiffer, San Diego, CA (US)

Correspondence Address: KNOBBE MARTENS OLSON & BEAR LLP, 2040 MAIN STREET, FOURTEENTH FLOOR, IRVINE, CA, 92614, US

(21) Appl. No.: 11/365,989

(22) Filed: Mar. 1, 2006

Related U.S. Application Data
(60) Provisional application No. 60/658,319, filed on Mar. 2, 2005.

(51) Int. Cl. G01N 33/53; C12Q 1/66; C07H 21/04; C12P 21/06; C12N 9/10; C12N 9/12

(52) U.S. Cl. 435/7.1; 435/8; 435/69.1; 435/193; 435/320.1; 435/325; 536/23.2; 435/194

(57) ABSTRACT

Disclosed herein are methods of evaluating whether a test compound functions as a ligand for a receptor tyrosine kinase. Also provided are methods of making pharmaceutical compositions that include agonists, antagonists, or inverse agonists of receptor tyrosine kinases. Also provides are isolated cells that include a receptor tyrosine kinase and a second protein, wherein the receptor tyrosine kinase contains a fluorescent donor moiety and the second protein contains a fluorescent acceptor moiety.

### RELATED APPLICATIONS

[0001] The present application claims priority to the Provisional Application Ser. No. 60/658,319, filed on Mar. 2, 2005, by Hans Schiffer, and entitled “FUNCTIONAL BIOLUMINESCENCE ENERGY RESONANCE TRANSFER (BRET) ASSAY TO SCREEN, IDENTIFY AND CHARACTERIZE, RECEPTOR TYROSINE KINASE LIGANDS,” which is hereby expressly incorporated by reference in its entirety.

### REFERENCE TO SEQUENCE LISTING

[0002] The present application is being filed along with duplicate copies of a CD-ROM marked “Copy 1” and “Copy 2” containing a Sequence Listing in electronic format. The duplicate copies of CD-ROM entitled The “Copy 1” and “Copy 2” each contains a file entitled ACADIA.072A.txt created on Mar. 1, 2006 which is 1,146,175 Bytes in size. The information on these duplicate CD-ROMs is incorporated herein by reference in its entirety.

### FIELD OF INVENTION

[0003] The present invention relates to a functional bioluminescence resonance energy transfer (BRET) kinase assay for screening and characterizing candidate molecules for their ability to activate or inhibit a kinase.

### BACKGROUND OF THE INVENTION

[0004] An important focus of pharmaceutical drug discovery is the identification of surrogate ligands for receptor proteins. Of particular interest in this respect is a subclass of receptor proteins known as receptor tyrosine kinases. The receptor tyrosine kinase (RTK) family is a large group of cell surface receptors that function in the regulation of cell growth, cell differentiation, adhesion, migration and apoptosis (Blume-Jensen and Hunter 2001) (Ullrich and Schlessinger 1990) (Schlessinger 2000) (Hubbard and Till 2000). A number of human diseases have been linked to alterations in RTKs (Akin and Metcalfe 2004) (Verheul and Pinedo 2003) (Corfas et al., 2004). Many RTKs have been identified as oncogenes in transforming retrovirus or human cancers (Hunter 2000) (Shawver et al., 2002) (Muller-Tidow et al., 2004), and recent reports indicate that RTKs may play a critical role in almost all types of human cancer (Shawver et al., 2002) (Prenzel et al., 2000) (Mass 2004). Both naturally occurring and artificial ligands that modulate RTK activity and signaling thus would be of tremendous interest from a therapeutic standpoint with respect to cancer and other diseases. (Haluska and Adjei 2001) (Sawyer et al., 2003). The ability to quickly, efficiently, and effectively screen vast libraries of compounds for particular activities would be greatly advantageous in identifying naturally occurring and/or artificial ligands that modulate RTK activity.

[0005] High throughput screening has become a commonly employed strategy to identify novel compounds with particular activities from a diverse chemical library of compounds. Often, high throughput screening assays are either based upon measuring compound binding to defined molecular targets or measuring functional outputs resulting from compound/receptor interactions. However, both binding assays and functional assays have limitations. For example, for various technical reasons, binding assays are preformed in non-physiological conditions. Artificial, non-physiological conditions may impact and influence receptor pharmacology, leading to increased unreliability and difficulty in accurate interpretation of the data. Another drawback arises from the nature of the assay, which measures receptor binding only. Thus, binding competition assays do not provide information regarding the physiological function of ligands, such as whether the ligand functions as an agonist or antagonist. Binding competition assays are also severely constrained by the fact that these assays are only useful in the study of binding sites for which labeled ligands (e.g. radioactive label) are available. Binding competition assays are also not easily amenable to orphan receptors for which ligands have not yet been identified. In addition, purchase, handling and disposal of radioisotopes are major expenses.

[0006] Functional assays overcome some of the limitations associated with binding competition assays. For example, functional assays are amenable to screening orphan receptors, and binding sites for which there is no labeled ligand available. Further, since functional assays measure activity output, the data generated enables discrimination between agonist and antagonist ligands (Kenakin 1999).

[0007] Although functional assays provide several advantages over binding competition assays, there are still several drawbacks to these assays. Specifically, functional assays are not amenable to the study of receptors for which there is no known cognate signaling pathway, since knowledge of the signal transduction properties of a the receptor, such as an RTK is an important prerequisite to be able to decide which functional assay can be successfully applied. Further, a single RTK may elicit heterogeneous responses, or functional outputs thus rendering measuring activity levels in response to various ligands more difficult.

[0008] Several functional assays have been described for receptor tyrosine kinases. Exemplary assays include the quantification of autophosphorylation of RTKs (Olive 2004), measurement of phosphorylation of RTKs and downstream signaling molecules (Olive 2004), measurement of intracellular calcium release (Dupriez et al., 2002), or measurement of RTK dependent cell proliferation (Mosmann 1983) (Bellamy 1992). Functional assays based on each of the above outputs have limitations. Specifically, measuring phosphorylation of RTKs or phosphorylation of downstream signaling proteins, or intracellular calcium changes lacks the throughput needed to perform HTS effectively and requires often expensive supply of antibodies. Furthermore, because the phenomenon of cell proliferation is affected by a large number of gene products, there is an intrinsically high rate of identifying a large percentage of false positives, such as compounds, which are not acting on the RTK of interest. Finally, background activity, or activity due to events other than activity of the receptor tyrosine kinase of interest poses a theoretical limitation in all functional assays.

[0009] Newer methods of screening for ligands are based on fluorescence polarization (FP) and time resolved fluorescence (TRF). A drawback of those fluorescence-based assays is the possible auto fluorescence background from the sample studied and the compound tested.

### SUMMARY OF THE INVENTION

[0010] Embodiments provide a method of evaluating whether a test compound functions as a ligand for a receptor tyrosine kinase, by providing a cell having a receptor tyrosine kinase and a second protein, wherein the second protein is found within close physical distance to the receptor tyrosine kinase if the test compound is a ligand for the receptor tyrosine kinase; contacting the cell with a test compound; and determining whether the receptor tyrosine kinase and the second protein interact in the presence of the test compound.

[0011] Other embodiments provide a method of evaluating whether a test compound functions as a ligand for a receptor tyrosine kinase, by providing an cell having a receptor tyrosine kinase and a second protein, wherein the receptor tyrosine kinase and second protein are within close physical distance to each other; contacting the cell with a test compound, wherein if the test compound is a ligand for the receptor tyrosine kinase, the receptor tyrosine kinase and the second protein will dissociate such that they are no longer within close physical distance to each other; and detecting the interaction between the receptor tyrosine kinase and the second protein.

[0012] In aspects of each of the above embodiments, the receptor tyrosine kinase comprises a bioluminescent donor moiety and the second protein comprises a fluorescent acceptor moiety. The receptor tyrosine kinase can be a fusion protein comprising a tyrosine kinase fused to the bioluminescent donor moiety, such as a luciferase, e.g., Renilla luciferase.

[0013] In other aspects of each of the above embodiments, the fluorescent acceptor moiety is a GFP moiety, such as GFP2, YFP, CFP, or an isoform or derivative thereof.

[0014] In embodiments wherein the RTK comprises a bioluminescent donor moiety, the determination step can comprise calculating the ratio of light emissions from the bioluminescent donor moiety and the fluorescent acceptor moiety.

[0015] In aspects of each of the above embodiments, the second protein can be a signaling protein that mediates receptor tyrosine kinase signal transduction. For example, the signaling protein can comprise an amino acid sequence selected from the group consisting of SEQ ID NOs: 2, 4, 6, 8, 10, 12, 14, 16, 18, 20, 22, 24, 26, 28, 30, 32, 34, 36, 38, 40, 42, 44, 46, 48, 50, and 52. Alternatively, the signaling protein can an amino acid sequence that has at least 70% amino acid identity to an amino acid sequence selected from the group consisting of SEQ ID NOs: 2, 4, 6, 8, 10, 12, 14, 16, 18, 20, 22, 24, 26, 28, 30, 32, 34, 36, 38, 40, 42, 44, 46, 48, 50, and 52, wherein the signaling protein retains the ability to interact with a cognate receptor tyrosine kinase. Yet other aspects provide signaling proteins having at least 5 consecutive amino acids of an amino acid sequence selected from the group consisting of SEQ ID NOs: 2, 4, 6, 8, 10, 12, 14, 16, 18, 20, 22, 24, 26, 28, 30, 32, 34, 36, 38, 40, 42, 44, 46, 48, 50, and 52, wherein the signaling protein retains the ability to interact with a cognate receptor tyrosine kinase.

[0016] In other aspects of each of the above embodiments the receptor tyrosine kinase can be an amino acid sequence selected from the group consisting of SEQ ID NOs: 110, 112, 114, 116, 118, 120, 122, 124, 126, 128, 130, 132, 134, 136, 138, 140, 142, 144, 146, 148, 150, 152, 154, 156, 158, 160, 162, 162, 164, 166, 168, 170, 172, 174, 176, 178, 180, 182, 184, 186, 188, 190, 192, 194, 196, 198, 200, 202, 204, 206, 208, 210, 212, 214, 216, 218, 220, 222, 224, or 226. In other aspects of each of the above embodiments, the receptor tyrosine kinase can have at least 70% identity to an amino acid sequence selected from the group consisting of SEQ ID NOs: 110, 112, 114, 116, 118, 120, 122, 124, 126, 128, 130, 132, 134, 136, 138, 140, 142, 144, 146, 148, 150, 152, 154, 156, 158, 160, 162, 162, 164, 166, 168, 170, 172, 174, 176, 178, 180, 182, 184, 186, 188, 190, 192, 194, 196, 198, 200, 202, 204, 206, 208, 210, 212, 214, 216, 218, 220, 222, 224, and 226, and wherein the receptor tyrosine kinase retains the ability to mediate ligand binding and signal transduction. Alternatively, in other aspects, the receptor tyrosine kinase comprises an amino acid having at least 5 consecutive amino acids of an amino acid sequence selected from the group consisting of SEQ ID NOs: 110, 112, 114, 116, 118, 120, 122, 124, 126, 128, 130, 132, 134, 136, 138, 140, 142, 144, 146, 148, 150, 152, 154, 156, 158, 160, 162, 162, 164, 166, 168, 170, 172, 174, 176, 178, 180, 182, 184, 186, 188, 190, 192, 194, 196, 198, 200, 202, 204, 206, 208, 210, 212, 214, 216, 218, 220, 222, 224, or 226, and wherein the receptor tyrosine kinase retains the ability to mediate ligand binding and signal transduction.

[0017] In aspects of each of the above embodiments, bioluminescence resonance energy transfer (BRET) technology can be utilized.

[0018] In aspects of embodiments providing a method of evaluating whether a test compound functions as a ligand for a receptor tyrosine kinase, by providing a cell having a receptor tyrosine kinase and a second protein, wherein the second protein is found within close physical distance to the receptor tyrosine kinase if the test compound is a ligand for the receptor tyrosine kinase; contacting the cell with a test compound; and determining whether the receptor tyrosine kinase and the second protein interact in the presence of the test compound, and embodiments that provide a method of evaluating whether a test compound functions as a ligand for a receptor tyrosine kinase, by providing an cell having a receptor tyrosine kinase and a second protein, wherein the receptor tyrosine kinase and second protein are within close physical distance to each other; contacting the cell with a test compound, wherein if the test compound is a ligand for the receptor tyrosine kinase, the receptor tyrosine kinase and the second protein will dissociate such that they are no longer within close physical distance to each other; and detecting the interaction between the receptor tyrosine kinase and the second protein, the receptor tyrosine kinase can be a fusion protein comprising a tyrosine kinase fused to said bioluminescent donor moiety.

[0019] In further aspect, the determination step comprises calculating the ratio of light emissions from the bioluminescent donor moiety and the fluorescent acceptor moiety. In yet other aspects, the second protein is a signaling protein that mediates receptor tyrosine kinase signal transduction. For example, the signaling protein can be an amino acid sequence selected from the group consisting of SEQ ID NOs: 2, 4, 6, 8, 10, 12, 14, 16, 18, 20, 22, 24, 26, 28, 30, 32, 34, 36, 38, 40, 42, 44, 46, 48, 50, and 52. In other aspects, the signaling protein can have an amino acid sequence having at least 70% amino acid identity to an amino acid sequence selected from the group consisting of SEQ ID NOs: 2, 4, 6, 8, 10, 12, 14, 16, 18, 20, 22, 24, 26, 28, 30, 32, 34, 36, 38, 40, 42, 44, 46, 48, 50, and 52, wherein the signaling protein retains the ability to interact with a cognate receptor tyrosine kinase. In other aspects, the signaling protein has at least 5 consecutive amino acids of an amino acid sequence selected from the group consisting of SEQ ID NOs: 2, 4, 6, 8, 10, 12, 14, 16, 18, 20, 22, 24, 26, 28, 30, 32, 34, 36, 38, 40, 42, 44, 46, 48, 50, and 52, wherein the signaling protein retains the ability to interact with a cognate receptor tyrosine kinase.

[0020] In other aspects, the receptor tyrosine kinase can be an amino acid sequence selected from the group consisting of SEQ ID NOs: 110, 112, 114, 116, 118, 120, 122, 124, 126, 128, 130, 132, 134, 136, 138, 140, 142, 144, 146, 148, 150, 152, 154, 156, 158, 160, 162, 162, 164, 166, 168, 170, 172, 174, 176, 178, 180, 182, 184, 186, 188, 190, 192, 194, 196, 198, 200, 202, 204, 206, 208, 210, 212, 214, 216, 218, 220, 222, 224, or 226. In yet other aspects, the receptor tyrosine kinase comprises an amino acid sequence having at least 70% identity to an amino acid sequence selected from the group consisting of SEQ ID NOs: 110, 112, 114, 116, 118, 120, 122, 124, 126, 128, 130, 132, 134, 136, 138, 140, 142, 144, 146, 148, 150, 152, 154, 156, 158, 160, 162, 162, 164, 166, 168, 170, 172, 174, 176, 178, 180, 182, 184, 186, 188, 190, 192, 194, 196, 198, 200, 202, 204, 206, 208, 210, 212, 214, 216, 218, 220, 222, 224, and 226, and wherein the receptor tyrosine kinase retains the ability to mediate ligand binding and signal transduction. In other aspects, the receptor tyrosine kinase comprises at least 5 consecutive amino acids of an amino acid sequence selected from the group consisting of SEQ ID NOs: 110, 112, 114, 116, 118, 120, 122, 124, 126, 128, 130, 132, 134, 136, 138, 140, 142, 144, 146, 148, 150, 152, 154, 156, 158, 160, 162, 162, 164, 166, 168, 170, 172, 174, 176, 178, 180, 182, 184, 186, 188, 190, 192, 194, 196, 198, 200, 202, 204, 206, 208, 210, 212, 214, 216, 218, 220, 222, 224, or 226, and wherein said receptor tyrosine kinase retains the ability to mediate ligand binding and signal transduction.

[0021] In still other aspects, fluorescent resonance energy transfer (FRET) technology can be utilized.

[0022] Other embodiments provide a method of assessing the effect of a test compound on the activity of a receptor tyrosine kinase comprising:
[0023] (i) providing a cell expressing one or more receptor tyrosine kinases and one or more second proteins, wherein at least one of the receptor tyrosine kinases or second proteins is expressed from a nucleic acid which has been introduced into the cell;
[0024] (ii) contacting the cell with the test compound; and
[0025] (iii) determining whether the test compound influences the activity of the receptor tyrosine kinase.

[0026] In some aspects, the determining step comprises determining whether the test compound is an agonist, determining whether the test compound is an antagonist, determining whether the test compound is an inverse agonist or determining whether the test compound is a selective modulator.

[0027] In other aspects, the test compound is a naturally occurring compound. In yet other aspects, the test compound is a synthetic compound.

[0028] Other embodiments provide an isolated cell comprising a receptor tyrosine kinase and a second protein, wherein the receptor tyrosine kinase comprises a bioluminescent donor moiety fusion protein and wherein the second protein comprises a fluorescent acceptor moiety fusion protein, and wherein modulation of the activity of the receptor tyrosine kinase affects the protein protein interactions between the receptor tyrosine kinase and the second protein.

[0029] Yet other embodiments provide an isolated cell comprising a receptor tyrosine kinase and a second protein, wherein the receptor tyrosine kinase comprises a fluorescent donor moiety fusion protein and wherein the second protein comprises a fluorescent acceptor moiety fusion protein, wherein the fluorescent donor moiety and the fluorescent acceptor moiety are different, and wherein modulation of the activity of the receptor tyrosine kinase affects the protein protein interactions between the receptor tyrosine kinase and the second protein.

[0030] In some aspects, the receptor tyrosine kinase is a fusion protein comprising a receptor tyrosine kinase fused to a fluorescent protein. For example, the fluorescent donor moiety can be a GFP moiety, such as GFP2. In yet other aspects, the fluorescent donor moiety is a YFP moiety, or a CFP moiety or any derivative thereof.

[0031] In other aspects, the fluorescent acceptor moiety is a GFP moiety, such as GFP2. In yet other aspects, the fluorescent acceptor moiety is a YFP moiety, or a CFP moiety.

[0032] In some aspects, the second protein is a signaling protein that mediates receptor tyrosine kinase signal transduction. In further aspects, the signaling protein comprises an amino acid sequence selected from the group consisting of SEQ ID NOs: 2, 4, 6, 8, 10, 12, 14, 16, 18, 20, 22, 24, 26, 28, 30, 32, 34, 36, 38, 40, 42, 44, 46, 48, 50, and 52. In other aspects, the signaling protein comprises an amino acid sequence having at least 70% amino acid identity to an amino acid sequence selected from the group consisting of SEQ ID NOs: 2, 4, 6, 8, 10, 12, 14, 16, 18, 20, 22, 24, 26, 28, 30, 32, 34, 36, 38, 40, 42, 44, 46, 48, 50, and 52, wherein the signaling protein retains the ability to interact with a cognate receptor tyrosine kinase. In still other aspects, the signaling protein comprises at least 5 consecutive amino acids of an amino acid sequence selected from the group consisting of SEQ ID NOs: 2, 4, 6, 8, 10, 12, 14, 16, 18, 20, 22, 24, 26, 28, 30, 32, 34, 36, 38, 40, 42, 44, 46, 48, 50, and 52, wherein the signaling protein retains the ability to interact with a cognate receptor tyrosine kinase.

[0033] In other aspects, the receptor tyrosine kinase comprises an amino acid sequence selected from the group consisting of SEQ ID NOs: 110, 112, 114, 116, 118, 120, 122, 124, 126, 128, 130, 132, 134, 136, 138, 140, 142, 144, 146, 148, 150, 152, 154, 156, 158, 160, 162, 162, 164, 166, 168, 170, 172, 174, 176, 178, 180, 182, 184, 186, 188, 190, 192, 194, 196, 198, 200, 202, 204, 206, 208, 210, 212, 214, 216, 218, 220, 222, 224, or 226. In yet other aspects the receptor tyrosine kinase comprises an amino acid sequence having at least 70% identity to an amino acid sequence selected from the group consisting of SEQ ID NOs: 110, 112, 114, 116, 118, 120, 122, 124, 126, 128, 130, 132, 134, 136, 138, 140, 142, 144, 146, 148, 150, 152, 154, 156, 158, 160, 162, 162, 164, 166, 168, 170, 172, 174, 176, 178, 180, 182, 184, 186, 188, 190, 192, 194, 196, 198, 200, 202, 204, 206, 208, 210, 212, 214, 216, 218, 220, 222, 224, or 226, and wherein the receptor tyrosine kinase retains the ability to mediate ligand binding and signal transduction. In still other aspects the receptor tyrosine kinase comprises at least 5 consecutive amino acids of an amino acid sequence selected from the group consisting of SEQ ID NOs: 110, 112, 114, 116, 118, 120, 122, 124, 126, 128, 130, 132, 134, 136, 138, 140, 142, 144, 146, 148, 150, 152, 154, 156, 158, 160, 162, 162, 164, 166, 168, 170, 172, 174, 176, 178, 180, 182, 184, 186, 188, 190, 192, 194, 196, 198, 200, 202, 204, 206, 208, 210, 212, 214, 216, 218, 220, 222, 224, or 226, and wherein the receptor tyrosine kinase retains the ability to mediate ligand binding and signal transduction.

[0034] In other aspects, cell is a eukaryotic cell. In further aspects, the cell is a mammalian cell.

[0035] Other embodiments provide method of evaluating whether a test compound functions as a ligand for a receptor tyrosine kinase, by providing an isolated cell comprising a receptor tyrosine kinase fused to a bioluminescent donor moiety and a second protein fused to a fluorescent acceptor moiety, contacting the cell with a substrate, wherein the bioluminescent donor moiety on the receptor tyrosine kinase emits light at a first wavelength in the presence of the substrate, wherein the energy emitted from the bioluminescent donor moiety is transferred to the fluorescent acceptor moiety on the second protein when the fluorescent acceptor moiety is in close proximity to the bioluminescent donor moiety, and wherein the fluorescent acceptor moiety emits light at a second wavelength when the bioluminescent donor moiety transfers energy to the fluorescent acceptor moiety; contacting the cell with a test compound; and measuring the emission of light at the first wavelength and at the second wavelength.

[0036] Other embodiments provide a method of making a pharmaceutical composition comprising: performing any one of the methods provided in each of the embodiments described above, identifying a test compound that is an agonist of the receptor tyrosine kinase; and combining the test compound with a pharmaceutically acceptable carrier.

[0037] Another embodiment provides a method of making a pharmaceutical composition comprising performing any one of each of the above embodiments providing methods for evaluating whether a test compound functions as a ligand for a receptor tyrosine kinase, or for assessing the effect of a test compound on the activity of a receptor tyrosine kinase, identifying a test compound that is an antagonist of the receptor tyrosine kinase; and combining the test compound with a pharmaceutically acceptable carrier.

[0038] Other embodiments provide a method of making a pharmaceutical comprising performing the method of any one of the above embodiments providing methods of evaluating whether a test compound functions as a ligand for a receptor tyrosine kinase, or for assessing the effect of a test compound on the activity of a receptor tyrosine kinase. identifying a test compound that is an inverse agonist of the receptor tyrosine kinase; and combining the test compound with a pharmaceutically acceptable carrier.

[0039] Other embodiments provide a method of making a pharmaceutical comprising performing the method of any one of each of the above embodiments that providing methods of evaluating whether a test compound functions as a ligand for a receptor tyrosine kinase, or for assessing the effect of a test compound on the activity of a receptor tyrosine kinase, identifying a test compound that is an selective modulator of the receptor tyrosine kinase; and combining the test compound with a pharmaceutically acceptable carrier

[0040] Other embodiments provide a pharmaceutical composition comprising a compound identified by any one the embodiments that provide methods of evaluating whether a test compound functions as a ligand for a receptor tyrosine kinase, or for assessing the effect of a test compound on the activity of a receptor tyrosine kinase, and a physiologically acceptable carrier, diluent, or excipient, or a combination thereof.

### BRIEF DESCRIPTION OF THE FIGURES

[0041] FIG. 1A illustrates the primary structure and topology of a typical RTK protein, including the transmembrane domain, kinase domain, and regulatory domain. FIG. 1B, depicts ligand binding induced activation of a receptor tyrosine kinase.

[0042] FIG. 2 is an illustration of exemplary RTK signaling pathways: (I) the RAS mitogen-activated protein kinase (RAS/MAP kinase) pathway, (II) the STAT pathway, (III) phosphatidylinositol 3′ kinase-protein B (PI3K-PKB/Akt) pathway and (IV) the phospholipaseC—protein kinase C (PLC-PKC) pathway. Phosphorylated receptor tyrosine kinase molecules recruit and modulate the activity of various signaling molecules, which in turn regulate various cellular functions such as transcription, metabolism, protein synthesis, etc.

[0043] FIG. 3 depicts a BRET assay. The host cell is engineered to co-express an RTK-Renilla luciferase fusion protein and an RTK signaling protein-GFP fusion protein (GFP-GRB2).In the absence of ligand, contacting the cells with luciferase substrate (coelenteracine) results in emission of light at 395 nm. Following ligand binding, the RTK-luciferase fusion protein dimerizes and autophosphorylates. In this state, the RTK-luciferase fusion protein recruits the GFP-GRB2 to the RTK-luciferase. The close proximity of Renilla luciferase and GFP2 allows GFP excitation and emission of green light at 510 nm in the presence of substrate.

[0044] FIG. 4 illustrates a typical BRET assay readout, showing ligand dependent axtivation of the RTK epidermal growth factor receptor (EGFR) using the signaling protein Grb2. The EGFR agonist epidermal growth factor (EGF) leads to a dose-dependent increase in the BRET signal.

[0045] FIG. 5 illustrates a typical BRET assay readout, showing ligand dependent inhibition of agonist activated RTK epidermal growth factor receptor (EGFR) using the signaling protein Grb2. Contacting the cells with the EGFR antagonist Iressa (gefitinib) leads to a dose dependent decrease in an agonist evoked BRET signal.

[0046] FIG. 6 illustrates the stability of the BRET signal generated in an agonist (EGF) evoked epidermal growth factor receptor (EGFR) over a time period of 24 hours.

[0047] FIG. 7 illustrates the stability of the BRET signal generated in an agonist evoked epidermal growth factor receptor (EGFR) after 24 hours using various concentrations of agonist.

[0048] FIG. 8 illustrates the stability of the BRET signal generated in an agonist (EGF) evoked epidermal growth factor receptor (EGFR) following treatment with an antagonist (Iressa).

[0049] FIG. 9 illustrates the stability of the BRET assay for detection of ligand dependent inhibition of agonist induced activation of receptor tyrosine kinase EGFR. The signaling protein is Grb2.

[0050] FIG. 10 illustrates a typical BRET assay readout, showing ligand dependent activation of the RTK epidermal growth factor receptor (EGFR) using the signaling protein Shcp46. The EGFR agonist epidermal growth factor (EGF) leads to a dose-dependent increase in the BRET signal.

[0051] FIG. 11 illustrates a typical BRET assay readout, showing ligand dependent inhibition of RTK epidermal growth factor receptor (EGFR) using the signaling protein Schp42. Application of the EGFR antagonist Iressa leads to a dose dependent decrease in an agonist evoked BRET signal. 2 nM epidernal growth factor (EGF) was used as agonist.

[0052] FIG. 12 illustrates a typical BRET assay readout, showing ligand dependent activation of RTK epidermal growth factor receptor (EGFR) using the signaling protein STAT5A. The EGFR agonist epidermal growth factor (EGF) leads to a dose-dependent increase in the BRET signal.

### DETAILED DESCRIPTION OF THE PREFERRED EMBODIMENTS

[0053] Methods disclosed herein relate to evaluating whether a test compound functions as a ligand for a receptor tyrosine kinase (RTK). Receptor tyrosine kinases (RTKs) are functionally defined as ligand activated kinases that transduce an extracellular signal across the cellular membrane into eukaryotic cells (Blume-Jensen and Hunter 2001) (Ullrich and Schlessinger 1990) (Schlessinger 2000) (Hubbard and Till 2000). A schematic of a typical RTK is depicted in FIG. 1. RTKs have an extracellular domain, a transmembrane domain, a kinase domain and a regulatory domain. Ligand binding occurs via the extracellular domain. The regulatory domain contains tyrosine residues that are phosphorylated through the autocatalytic kinase activity of the kinase domain when the RTK is activated. Numerous receptor kinases have been identified to date in several species, and are amenable to use in the methods disclosed herein. A non-limiting list of some of the receptor tyrosine kinases that have been identified in humans is found in Table 2.

[0054] As used herein, the term “ligand” is intended to include any substance that either inhibits or stimulates the activity of a receptor. Ligands can be naturally occurring (e.g., isolatable from a natural source), or synthesized (e.g., manipulated by man). For example in some embodiments synthetic compounds can be generated using combinatorial chemistry. Ligands can be any type of molecule, including but not limited to small molecules, pharmaceuticals, nucleic acids, and peptides. Mechanistically, different types of ligands modulate the activity of receptor kinases in different ways. For example, binding of agonists to RTKs increases their functional activity. On the other hand, binding of antagonist ligands decreases the RTKs' functional activity. Antagonists themselves can function either by inhibiting the action of an agonist or by its own activity (inverse agonist).

[0055] Upon binding of an agonist ligand, the RTK can undergo hetero- or homodimer formation, as shown in FIG. 1. Dimerization of the receptor can activate an intrinsic kinase activity of the receptor, which can lead to autophosphorylation of tyrosine residues within the cytoplasmic tail of the receptors (Heldin 1995) (Ullrich and Schlessinger 1990) (McDonald et al., 1995) (Cunningham and Greene 1998). The phosphorylated tyrosine sites can serve as docking sites for a variety of signaling molecules, whose recruitment leads to the activation of several intracellular pathways (Pawson et al., 1993; Pawson and Schlessingert 1993) (Pawson 1995; Pawson 2002). The pattern of tyrosine autophosphorylation determines which pathway is activated, and this pattern is in turn influenced by the identity of the ligands, as well as the identity of the RTK, and whether it is a hetero or homodimer.

[0056] recruitment of signaling molecules to activated RTKs reflects an initial step in the signal transduction pathway (Pawson et al., 1993; Pawson and Schlessingert 1993) (Pawson 1995; Pawson 2002). Proteins involved in RTK biology and signaling may interact with more than one RTK. Several signaling proteins are known to have general functions in RTK biology and interact with many, if not all known RTKs (e.g. Grb2). Other signaling molecules, such as the Ptp-1B, tensinl, Rackl, N-Rage, PSD-95 etc. have a more limited range of cognate RTKs. Each RTK signaling pathway is characterized by a specific set of signaling proteins, which are involved in transducing the ligand induced RTK signal from the receptor downstream into the cell. FIG. 2 shows exemplary sets of signaling proteins interacting with a receptor tyrosine kinase. The particular signaling pathway is dependent upon what signaling molecules interact with the activated receptor tyrosine kinase. As will become clear from the discussion below, the embodiments disclosed herein provide a means of evaluating the effects of test compounds on particular RTK signaling pathways, as well as for identifying “selective modulators”, or compounds that modulate the activity of a particular combination of receptor and one or more signaling molecules, that have mixed agonist/antagonist characteristics. A non-limiting list of examples of RTK signaling molecules is presented in Table 1.

[0057] In some embodiments, a suitable host cell is engineered to co-expresses an RTK and a second protein. Any RTK, such as those listed in Table 1, can be expressed in cells in embodiments disclosed herein. Those of skill in the art will understand that variants of RTKs that retain their ligand binding and activation properties, including autokinase and interaction with signaling molecules can also be used in the described embodiments. For example, polypeptides that have at least 97%, at least 95%, at least 90%, at least 85%, at least 80%, or at least 70% sequence identity to, any one of the polypeptides of SEQ ID NO's: 110, 112, 114, 116, 118, 120, 122, 124, 126, 128, 130, 132, 134, 136, 138, 140, 142, 144, 146, 148, 150, 152, 154, 156, 158, 160, 162, 162, 164, 166, 168, 170, 172, 174, 176, 178, 180, 182, 184, 186, 188, 190, 192, 194, 196, 198, 200, 202, 204, 206, 208, 210, 212, 214, 216, 218, 220, 222, 224, or 226, that still retain ligand binding and activation properties of those polypeptides can be used in the described embodiments. Alternatively truncated versions of second proteins that have at least 5, 10, 15, 20, 25, 30, 40, 50, 75, 100, or 150, or more than 150 consecutive amino acids of any one of the polypeptides of SEQ ID NO's: 110, 112, 114, 116, 118, 120, 122, 124, 126, 128, 130, 132, 134, 136, 138, 140, 142, 144, 146, 148, 150, 152, 154, 156, 158, 160, 162, 162, 164, 166, 168, 170, 172, 174, 176, 178, 180, 182, 184, 186, 188, 190, 192, 194, 196, 198, 200, 202, 204, 206, 208, 210, 212, 214, 216, 218, 220, 222, 224, or 226, that still retain ligand binding and activation properties of those polypeptides can be used in the described embodiments. Identity can be determined using the FASTA version 3.0t78 algorithm with the default parameters. Alternatively, protein identity or similarity can be identified using BLASTP with the default parameters, BLASTX with the default parameters, TBLASTN with the default parameters, or tBLASTX with the default parameters. (Altschul, S.F. et al. Gapped BLAST and PSI-BLAST: A New Generation of Protein Database Search Programs, Nucleic Acid Res. 25: 3389-3402 (1997), the disclosure of which is incroproated herein by reference in its entirety).

[0058] The expressed RTK can be in the form of a fusion protein, for example a fusion to a bioluminescent donor moiety, or a fluorescent donor moiety. As used herein, the term bioluminescent donor moiety (BDM) refers to any moiety capable of acting on a suitable substrate to transform chemical energy into light energy. There are a number of different bioluminescent donor proteins that can be employed in this invention. One well characterized example is the class of proteins known as luciferases. Luciferaces proteins catalyze an energy-yielding chemical reaction in which a specific biochemical substance, a luciferin (a naturally occurring substrate), is oxidized by an enzyme having a luciferase activity. Both prokaryotic and eukaryotic organisms including species of bacteria, algae, fungi, insects, fish and other marine forms can emit light energy in this manner and each has specific luciferase activities and luciferins, which are chemically distinct from those of other organisms. Luciferin/luciferase systems are very diverse in form, chemistry and function. For example, there are luciferase activities which facilitate continuous chemiluminescence, as exhibited by some bacteria and mushrooms, and those which are adapted to facilitate sporadic, or stimuli induced, emissions, as in the case of dinoflagellate algae. As a phenomenon, which entails the transformation of chemical energy into light energy, bioluminescence is not restricted to living organisms, nor does it require the presence of living organisms. It is simply a type of chemiluminescent reaction that requires a luciferase activity, which at one stage or another had its origins from a biological catalyst. Hence the preservation or construction of the essential activities and chemicals suffices to have the means to give rise to bioluminescent phenomena. Bioluminescent proteins with luciferase activity are thus available from a variety of sources or by a variety of means. Examples of bioluminescent proteins with luciferase activity may be found in U.S. Pat. Nos. 5,229,285, 5,219,737, 5,843,746, 5,196,524, 5,670,356.

[0059] Alternative BDMs include enzymes, which can act on suitable substrates to generate a luminescent signal. Specific examples of such enzymes are β-galactosidase, alkaline phosphatase, β-glucuronidase and β-glucosidase. Synthetic luminescent substrates for these enzymes are well known in the art and are commercially available from companies, such as Tropix Inc. (Bedford, Mass., USA). BDMs can also be isolated or engineered from insects (U.S. Pat. No. 5,670,356).

[0060] Depending on the substrate, BDMs emit light at different wavelengths. Non-limiting examples of substrates for BDMs include coelenterazine, benzothiazole, luciferin, enol formate, terpene, and aldehyde, and the like. The BDM moiety can be fused to either the amino terminal or carboxyl terminal portion of the RTK protein. Preferably, the positioning of the BDM domain within the RTK-BDM fusion does not alter the activity of the native protein. RTK-BDM fusion proteins can be tested to ensure that it retains biochemical properties, such as ligand binding and ability to interact with downstream signaling molecules of the native protein. By way of example, a carboxy terminal fusion of the Renilla luciferase gene to the EGFR RTK can be used in the embodiments described herein.

[0061] As used herein, the term fluorescent donor moiety (FDM) refers to any moiety that can fluoresce when excited with an appropriate electromagnetic radiation. Non-limiting examples of FDMs include Green Fluorescent Protein (GFP), or isoforms and derivatives thereof such as YFP, EGFP, EYFP and the like (R. Y. Tsien, (1998) Ann. Rev. Biochem. 63:509-544; U.S. Patent Application No. 20050026234). Red fluorescent protein (RFP) such as a Discosoma RFP; or a fluorescent protein related to an RFP, such as a cyan fluorescent protein (CFP), an enhanced CFP, citrine. Preferably, the positioning of the FDM domain within the FDM-second protein fusion does not alter the activity of the native protein.

[0062] The second protein can interact directly or indirectly with the RTK. This interaction can be directly dependent upon the activation state of the RTK. For example, the second protein can be an RTK signaling protein. For example, the signaling protein can have the amino acid sequence of SEQ ID NO: 2, 4, 6, 8, 10, 12, 14, 16, 18, 20, 22, 24, 26, 28, 30, 32, 34, 36, 38, 40, 42, 44, 46, 48, 50, or 52, or can have an amino acid sequence that is at least 97%, at least 95%, at least 90%, at least 85%, at least 80%, or at least 70% identical thereto. Alternatively, the signaling molecule can be a truncated version of comprising at least 5, 10, 15, 20, 25, 30, 40, 50, 75, 100, 150, or more than 150 consecutive amino acids of any one of the amino acid sequences of SEQ ID NO: 2, 4, 6, 8, 10, 12, 14, 16, 18, 20, 22, 24, 26, 28, 30, 32, 34, 36, 38, 40, 42, 44, 46, 48, 50, or 52 that retains RTK interaction properties of the native form of the protein. In yet other aspects, the second protein can be the receptor binding domain of any of the polypeptides of SEQ ID NO's: 2, 4, 6, 8, 10, 12, 14, 16, 18, 20, 22, 24, 26, 28, 30, 32, 34, 36, 38, 40, 42, 44, 46, 48, 50, or 52. Identity can be determined using the FASTA version 3.0t78 algorithm with the default parameters. Alternatively, protein identity or similarity can be identified using BLASTP with the default parameters, BLASTX with the default parameters, TBLASTN with the default parameters, or tBLASTX with the default parameters. (Altschul, S. F. et al. Gapped BLAST and PSI-BLAST: A New Generation of Protein Database Search Programs, Nucleic Acid Res. 25: 3389-3402 (1997), the disclosure of which is incroproated herein by reference in its entirety).

[0063] The expressed second protein can be a fusion protein, for example a fusion to a fluorescent acceptor moiety (FAM). The term “acceptor” refers to a quencher that operates via energy transfer. Acceptors may re-emit the transferred energy as fluorescence and are “fluorescent acceptor moieties”. Examples of FAMs, include Green Fluorescent Protein (GFP), or isoforms and derivatives thereof such as YFP, EGFP, EYFP and the like (R. Y. Tsien, (1998) Ann. Rev. Biochem. 63:509-544). Preferably, the positioning of the FAM domain within the FAM-second protein fusion does not alter the activity of the native protein. FAM-second protein fusion proteins can be tested to ensure that it retains biochemical properties of the cognate native protein, such as interaction with RTKs. By way of example, an amino terminal fusion of the GFP protein to Gbr2, Shpc42 or STAT5 can be used in the embodiments described herein.

[0064] In aspects of the invention wherein the RTK comprises an FDM, the second protein preferably does not comprise an FAM that is identical to the FDM of the RTK.

[0065] In some embodiments, the RTK can comprise a FAM, and the second protein can comprise an BDM or FDM. In aspects of the invention wherein the RTK comprises an FAM, the second protein preferably does not comprise an FDM that is identical to the FAM of the second protein.

[0066] In general, DNA sequences encoding one or more receptor tyrosine kinases and DNA sequences encoding second proteins, such as signaling proteins can be cloned into suitable expression vectors, such as plasmids, viral particles and phage, that are compatible with the host cells used in the described embodiments. Those of skill in the art will understand that any of a wide variety of expression systems can be used in the described embodiments, and that expression vectors carry elements necessary for the expression of the proteins in the appropriate host cells, such as promoter sequences, ribosome binding sites. The vector can also comprise elements such as polyadenylation signals, transcriptional enhancer sequences, translational enhancer sequences, origin of replication and integration sequences.

[0067] Expression vectors can be engineered using well-known techniques in recombinant DNA technology to create in-frame fusions of the protein of interest (i.e., a receptor tyrosine kinase or a signaling protein) to BDMs or FAMs. Vectors and recombinant DNA techniques are well known to those of skill in the art (cf., for instance Sambrook et al., Molecular Cloning: A laboratory Manual, Cold Spring Harbor Laboratory, Cold Spring Harbor, N.Y., 1989). The RTK and second protein can be expressed from the same vector, or can be expressed from different vectors.

[0068] Methods well known to those of skill in the art can be used to introduce the expression vectors into suitable host cells. Methods of transfecting mammalian cells and expressing DNA sequences introduced in the cells are described in e.g., Kaufman and sharp, J. Mol. Biol. 159 (1982), 601-621; Southern and Berg, J. Mol. Appl. Genet. 1 (1982), 327-341; Loyter et al., Proc. Natl. Acad. Sci USA 79 (1982), 422-426; Wiggler et al., Cell 14 (1978), 725; Corsaro and Pearson, Somatic Cell Genetics 7 (1981), 603, Graham and ver der Eb, Virology 52 (1973), 456; Neumann et al., EMBO J. 1 (1982), 841-845; and Wigler et al., Cell 11, 1977, pp. 223-232. Those skilled in the art will understand that expression vectors can be transiently introduced into host cells or can be stably maintained within host cells. Suitable host cells include but are not limited to eukaryotic cells such as yeast cells, insect cells, or mammalian cells such as CHO, VERO, BHK, HeLa, COS, MDCK, HEK293, NIH-3T3, WI38 cells and the like.

[0069] Cells expressing RTK proteins and second proteins can be contacted with test compounds. Test compounds can be used whether they are used to test known compounds or to identify new compounds that interact with the receptor. For example, test compounds can be used which include, but are not limited to, small molecules, pharmaceuticals, nucleic acids, peptides, antibodies, ligands, agonists, and antagonists. Following exposure to the test compound, the interaction between the RTK and the second protein can be assessed. As described above, the extent of interactions between the RTK and the second protein is directly correlated to the activation state (i.e., tyrosine phosphorylation pattern) of the RTK.

[0070] In some embodiments, the interaction between the RTK and second protein is functionally linked to a measurable output based on a bioluminescence resonance energy transfer (BRET). (Xu et al., 1999) (Bertrand et al., 2002) (Xu et al., 1999) (Vrecl et al., 2004) (Heding 2004). BRET based assays can be used to monitor the interaction of proteins having a bioluminescent donor moiety with proteins having a fluorescent acceptor moiety, such as in the disclosed embodiments. Briefly, cells expressing a RTK-BDM fusion will convert the substrate's chemical energy into light. If there is FAM in close proximity to the RTK-BDM fusion, then the cells will emit light at a certain wavelength. For example, BRET based assays can be used to assess the interaction between a RTK-luciferase fusion and a GFP2 fusion protein to a signaling protein. Treating cells expressing an RTK Renilla luciferase (Rluc) fusion with the substrate coelenteracine 400A (Hart et al., 1979) results in emission of light at 395 nm. Activation of the RTK, for example by agonist binding, results in interaction between the RTK and second protein. The BDM can transfer energy to the FAM if donor and acceptor are close enough in physical distance (<100 angstrom) (Ward and Cormier 1979). With the FAM GFP2 in close proximity to the BDM Rluc, energy is transferred from the luciferase to GFP2, thereby exciting the GFP2 moiety and causing GFP2 to emit of green light at 510 nm. The efficiency of the energy transfer between Rluc and GFP2 can be measured by determine the ratio between the light emission of the fluorescence acceptor moiety and the bioluminescence donor. The BRET signal is expressed as the ratio between the GFP2 and luciferase light emissions. Ligands or compounds that modulate the RTK activity will cause changes in this BRET ratio due to different amounts of RTK-Rluc/GFP2-second protein complexes in the cell.

[0071] In other embodiments, the interaction between the RTK and second protein is functionally linked to a measurable output based on a fluorescence resonance energy transfer (FRET). As with BRET, FRET assays involve exploiting the ability to detect the proximity of two fluorophores to each other. FRET can be performed as described in Miyawaki and Tsien, 2000, Methods Enzymol. 327: 472-500, which is herein incorporated by reference in its entirety. For example, FRET can be used to measure the interaction between an RTK comprising an FDM and a second protein comprising an FAM. Ligands or compounds that modulate the RTK activity will cause changes in the FRET ratio due to different amounts of RTK-Rluc/GFP2-second protein complexes in the cell.

[0072] Any of the above methods can be used to measure association or dissociation of the RTK and second protein. For example, BRET and FRET measurements of cells contacted with test compounds can be compared to the BRET and FRET measurements of cells that have not been contacted with a test compound.

[0073] Any of the methods disclosed above can be used to identify compound that affect the ability of known agonists, antagonists, inverse agonists, and selective modulators, to effect the activity of RTKs. For example, any of the above methods can be performed on cells in the presence of known agonists or antagonists.

[0074] In another aspect, the present invention relates to a pharmaceutical composition comprising a compound that has been identified by any of the methods disclosed above, as described above, and a physiologically acceptable carrier, diluent, or excipient, or a combination thereof.

[0075] The term “pharmaceutical composition” refers to a mixture of a compound of the invention with other chemical components, such as diluents or carriers. The pharmaceutical composition facilitates administration of the compound to an organism. Multiple techniques of administering a compound exist in the art including, but not limited to, oral, injection, aerosol, parenteral, and topical administration. Pharmaceutical compositions can also be obtained by reacting compounds with inorganic or organic acids such as hydrochloric acid, hydrobromic acid, sulfuric acid, nitric acid, phosphoric acid, methanesulfonic acid, ethanesulfonic acid, p-toluenesulfonic acid, salicylic acid and the like.

[0076] The term “carrier” defines a chemical compound that facilitates the incorporaton of a compound into cells or tissues. For example dimethyl sulfoxide (DMSO) is a commonly utilized carrier as it facilitates the uptake of many organic compounds into the cells or tissues of an organism.

[0077] The term “diluent” defines chemical compounds diluted in water that will dissolve the compound of interest as well as stabilize the biologically active form of the compound. Salts dissolved in buffered solutions are utilized as diluents in the art. One commonly used buffered solution is phosphate buffered saline because it mimics the salt conditions of human blood. Since buffer salts can control the pH of a solution at low concentrations, a buffered diluent rarely modifies the biological activity of a compound.

[0078] The term “physiologically acceptable” defines a carrier or diluent that does not abrogate the biological activity and properties of the compound.

[0079] The pharmaceutical compositions described herein can be administered to a human patient per se, or in pharmaceutical compositions where they are mixed with other active ingredients, as in combination therapy, or suitable carriers or excipient(s). Techniques for formulation and administration of the compounds of the instant application may be found in “Remington's Pharmaceutical Sciences,” Mack Publishing Co., Easton, Pa., 18th edition, 1990.

[0080] Suitable routes of administration may, for example, include oral, rectal, transmucosal, or intestinal administration; parenteral delivery, including intramuscular, subcutaneous, intravenous, intramedullary injections, as well as intrathecal, direct intraventricular, intraperitoneal, intranasal, or intraocular injections.

[0081] Alternately, one may administer the compound in a local rather than systemic manner, for example, via injection of the compound directly into the are of pain, often in a depot or sustained release formulation. Furthermore, one may administer the drug in a targeted drug delivery system, for example, in a liposome coated with a tissue-specific antibody. The liposomes will be targeted to and taken up selectively by the organ.

[0082] The pharmaceutical compositions of the present invention may be manufactured in a manner that is itself known, e.g., by means of conventional mixing, dissolving, granulating, dragee-making, levigating, emulsifying, encapsulating, entrapping or tabletting processes.

[0083] Pharmaceutical compositions for use in accordance with the present invention thus may be formulated in conventional manner using one or more physiologically acceptable carriers comprising excipients and auxiliaries which facilitate processing of the active compounds into preparations which can be used pharmaceutically. Proper formulation is dependent upon the route of administration chosen. Any of the well-known techniques, carriers, and excipients may be used as suitable and as understood in the art; e.g., in Remington's Pharmaceutical Sciences, above.

[0084] For injection, the agents of the invention may be formulated in aqueous solutions, preferably in physiologically compatible buffers such as Hanks's solution, Ringer's solution, or physiological saline buffer. For transmucosal administration, penetrants appropriate to the barrier to be permeated are used in the formulation. Such penetrants are generally known in the art.

[0085] For oral administration, the compounds can be formulated readily by combining the active compounds with pharmaceutically acceptable carriers well known in the art. Such carriers enable the compounds of the invention to be formulated as tablets, pills, dragees, capsules, liquids, gels, syrups, slurries, suspensions and the like, for oral ingestion by a patient to be treated. Pharmaceutical preparations for oral use can be obtained by mixing one or more solid excipient with pharmaceutical combination of the invention, optionally grinding the resulting mixture, and processing the mixture of granules, after adding suitable auxiliaries, if desired, to obtain tablets or dragee cores. Suitable excipients are, in particular, fillers such as sugars, including lactose, sucrose, mannitol, or sorbitol; cellulose preparations such as, for example, maize starch, wheat starch, rice starch, potato starch, gelatin, gum tragacanth, methyl cellulose, hydroxypropylmethyl-cellulose, sodium carboxymethylcellulose, and/or polyvinylpyrrolidone (PVP). If desired, disintegrating agents may be added, such as the cross-linked polyvinyl pyrrolidone, agar, or alginic acid or a salt thereof such as sodium alginate.

[0086] Dragee cores are provided with suitable coatings. For this purpose, concentrated sugar solutions may be used, which may optionally contain gum arabic, talc, polyvinyl pyrrolidone, carbopol gel, polyethylene glycol, and/or titanium dioxide, lacquer solutions, and suitable organic solvents or solvent mixtures. Dyestuffs or pigments may be added to the tablets or dragee coatings for identification or to characterize different combinations of active compound doses.

[0087] Pharmaceutical preparations which can be used orally include push-fit capsules made of gelatin, as well as soft, sealed capsules made of gelatin and a plasticizer, such as glycerol or sorbitol. The push-fit capsules can contain the active ingredients in admixture with filler such as lactose, binders such as starches, and/or lubricants such as talc or magnesium stearate and, optionally, stabilizers. In soft capsules, the active compounds may be dissolved or suspended in suitable liquids, such as fatty oils, liquid paraffin, or liquid polyethylene glycols. In addition, stabilizers may be added. All formulations for oral administration should be in dosages suitable for such administration.

[0088] For buccal administration, the compositions may take the form of tablets or lozenges formulated in conventional manner.

[0089] For administration by inhalation, the compounds for use according to the present invention are conveniently delivered in the form of an aerosol spray presentation from pressurized packs or a nebulizer, with the use of a suitable propellant, e.g., dichlorodifluoromethane, trichlorofluoromethane, dichlorotetrafluoroethane, carbon dioxide or other suitable gas. In the case of a pressurized aerosol the dosage unit may be determined by providing a valve to deliver a metered amount. Capsules and cartridges of, e.g., gelatin for use in an inhaler or insufflator may be formulated containing a powder mix of the compound and a suitable powder base such as lactose or starch.

[0090] The compounds may be formulated for parenteral administration by injection, e.g., by bolus injection or continuous infusion. Formulations for injection may be presented in unit dosage form, e.g., in ampoules or in multi-dose containers, with an added preservative. The compositions may take such forms as suspensions, solutions or emulsions in oily or aqueous vehicles, and may contain formulatory agents such as suspending, stabilizing and/or dispersing agents.

[0091] Pharmaceutical formulations for parenteral administration include aqueous solutions of the active compounds in water-soluble form. Additionally, suspensions of the active compounds may be prepared as appropriate oily injection suspensions. Suitable lipophilic solvents or vehicles include fatty oils such as sesame oil, or synthetic fatty acid esters, such as ethyl oleate or triglycerides, or liposomes. Aqueous injection suspensions may contain substances which increase the viscosity of the suspension, such as sodium carboxymethyl cellulose, sorbitol, or dextran. Optionally, the suspension may also contain suitable stabilizers or agents which increase the solubility of the compounds to allow for the preparation of highly concentrated solutions.

[0092] Alternatively, the active ingredient may be in powder form for constitution with a suitable vehicle, e.g., sterile pyrogen-free water, before use.

[0093] The compounds may also be formulated in rectal compositions such as suppositories or retention enemas, e.g., containing conventional suppository bases such as cocoa butter or other glycerides.

[0094] In addition to the formulations described previously, the compounds may also be formulated as a depot preparation. Such long acting formulations may be administered by implantation (for example subcutaneously or intramuscularly) or by intramuscular injection. Thus, for example, the compounds may be formulated with suitable polymeric or hydrophobic materials (for example as an emulsion in an acceptable oil) or ion exchange resins, or as sparingly soluble derivatives, for example, as a sparingly soluble salt.

[0095] A pharmaceutical carrier for the hydrophobic compounds of the invention is a cosolvent system comprising benzyl alcohol, a nonpolar surfactant, a water-miscible organic polymer, and an aqueous phase. A common cosolvent system used is the VPD co-solvent system, which is a solution of 3% w/v benzyl alcohol, 8% w/v of the nonpolar surfactant Polysorbate 80™, and 65% w/v polyethylene glycol 300, made up to volume in absolute ethanol. Naturally, the proportions of a co-solvent system may be varied considerably without destroying its solubility and toxicity characteristics. Furthermore, the identity of the co-solvent components may be varied: for example, other low-toxicity nonpolar surfactants may be used instead of POLYSORBATE 80™; the fraction size of polyethylene glycol may be varied; other biocompatible polymers may replace polyethylene glycol, e.g., polyvinyl pyrrolidone; and other sugars or polysaccharides may substitute for dextrose.

[0096] Alternatively, other delivery systems for hydrophobic pharmaceutical compounds may be employed. Liposomes and emulsions are well known examples of delivery vehicles or carriers for hydrophobic drugs. Certain organic solvents such as dimethylsulfoxide also may be employed, although usually at the cost of greater toxicity. Additionally, the compounds may be delivered using a sustained-release system, such as semipermeable matrices of solid hydrophobic polymers containing the therapeutic agent. Various sustained-release materials have been established and are well known by those skilled in the art. Sustained-release capsules may, depending on their chemical nature, release the compounds for a few weeks up to over 100 days. Depending on the chemical nature and the biological stability of the therapeutic reagent, additional strategies for protein stabilization may be employed.

[0097] Many of the compounds used in the pharmaceutical combinations of the invention may be provided as salts with pharmaceutically compatible counterions. Pharmaceutically compatible salts may be formed with many acids, including but not limited to hydrochloric, sulfuric, acetic, lactic, tartaric, malic, succinic, etc. Salts tend to be more soluble in aqueous or other protonic solvents than are the corresponding free acid or base forms.

[0098] Pharmaceutical compositions suitable for use in the present invention include compositions where the active ingredients are contained in an amount effective to achieve its intended purpose. More specifically, a therapeutically effective amount means an amount of compound effective to prevent, alleviate or ameliorate symptoms of disease or prolong the survival of the subject being treated. Determination of a therapeutically effective amount is well within the capability of those skilled in the art, especially in light of the detailed disclosure provided herein.

[0099] The exact formulation, route of administration and dosage for the pharmaceutical compositions of the present invention can be chosen by the individual physician in view of the patient's condition. (See e.g., Fingl et al. 1975, in “The Pharmacological Basis of Therapeutics”, Ch. 1 p. 1). Typically, the dose range of the composition administered to the patient can be from about 0.5 to 1000 mg/kg of the patient's body weight, or 1 to 500 mg/kg, or 10 to 500 mg/kg, or 50 to 100 mg/kg of the patient's body weight. The dosage may be a single one or a series of two or more given in the course of one or more days, as is needed by the patient. Note that for almost all of the specific compounds mentioned in the present disclosure, human dosages for treatment of at least some condition have been established. Thus, in most instances, the present invention will use those same dosages, or dosages that are between about 0.1% and 500%, or between about 25% and 250%, or between 50% and 100% of the established human dosage. Where no human dosage is established, as will be the case for newly-discovered pharmaceutical compounds, a suitable human dosage can be inferred from ED₅₀ or ID₅₀ values, or other appropriate values derived from in vitro or in vivo studies, as qualified by toxicity studies and efficacy studies in animals.

[0100] Although the exact dosage will be determined on a drug-by-drug basis, in most cases, some generalizations regarding the dosage can be made. The daily dosage regimen for an adult human patient may be, for example, an oral dose of between 0.1 mg and 500 mg of each ingredient, preferably between 1 mg and 250 mg, e.g. 5 to 200 mg or an intravenous, subcutaneous, or intramuscular dose of each ingredient between 0.01 mg and 100 mg, preferably between 0.1 mg and 60 mg, e.g. 1 to 40 mg of each ingredient of the pharmaceutical compositions of the present invention or a pharmaceutically acceptable salt thereof calculated as the free base, the composition being administered 1 to 4 times per day. Alternatively the compositions of the invention may be administered by continuous intravenous infusion, preferably at a dose of each ingredient up to 400 mg per day. Thus, the total daily dosage by oral administration of each ingredient will typically be in the range 1 to 2000 mg and the total daily dosage by parenteral administration will typically be in the range 0.1 to 400 mg. Suitably the compounds will be administered for a period of continuous therapy, for example for a week or more, or for months or years.

[0101] Dosage amount and interval may be adjusted individually to provide plasma levels of the active moiety which are sufficient to maintain the modulating effects, or minimal effective concentration (MEC). The MEC will vary for each compound but can be estimated from in vitro data. Dosages necessary to achieve the MEC will depend on individual characteristics and route of administration. However, HPLC assays or bioassays can be used determine plasma concentrations.

[0102] Dosage intervals can also be determined using MEC value. Compositions should be administered using a regimen which maintains plasma levels above the MEC for 10-90% of the time, preferably between 30-90% and most preferably between 50-90%.

[0103] In cases of local administration or selective uptake, the effective local concentration of the drug may not be related to plasma concentration.

[0104] The amount of composition administered will, of course, be dependent on the subject being treated, on the subject's weight, the severity of the affliction, the manner of administration and the judgment of the prescribing physician.

[0105] The compositions may, if desired, be presented in a pack or dispenser device which may contain one or more unit dosage forms containing the active ingredient. The pack may for example comprise metal or plastic foil, such as a blister pack. The pack or dispenser device may be accompanied by instructions for administration. The pack or dispenser may also be accompanied with a notice associated with the container in form prescribed by a governmental agency regulating the manufacture, use, or sale of pharmaceuticals, which notice is reflective of approval by the agency of the form of the drug for human or veterinary administration. Such notice, for example, may be the labeling approved by the U.S. Food and Drug Administration for prescription drugs, or the approved product insert. Compositions comprising a compound of the invention formulated in a compatible pharmaceutical carrier may also be prepared, placed in an appropriate container, and labeled for treatment of an indicated condition.

[0106] It will be understood by those of skill in the art that numerous and various modifications can be made without departing from the spirit of the present invention. Therefore, it should be clearly understood that the forms of the present invention are illustrative only and are not intended to limit the scope of the present invention.

TABLE I

| | | | | NCBI |
|---|---|---|---|---|
| | Gene | | Protein | Accession |
| Gene | SEQ ID NO. | Protein | SEQ ID NO. | Number |
| GRB2 | 1 | grb2 | 2 | NM_002086 |
| GRB4 | 3 | grb4 | 4 | NM_003581 |
| GRB7 | 5 | grb7 | 6 | D43772 |
| GRB10 | 7 | grb10 | 8 | NM_005311 |
| GRB14 | 9 | grb14 | 10 | L76687 |
| SHC1 | 11 | Shc1 | 12 | NM_003029 |
| SHC2 | 13 | Shc2 | 14 | XM_375550 |
| SHC3 | 15 | Shc3 | 16 | NM_016848 |
| STAT1 | 17 | Stat1 | 18 | NM_007315 |
| STAT2 | 19 | Stat2 | 20 | NM_005419 |
| STAT3 | 21 | Stat3 | 22 | NM_139276 |
| STAT4 | 23 | Stat4 | 24 | NM_003151 |
| STAT5A | 25 | Stat5A | 26 | NM_003152 |
| STAT5B | 27 | Stat5B | 28 | NM_012448 |
| STAT6 | 29 | Stat6 | 30 | NM_003153 |
| YWHAZ | 31 | 14-3-3zeta | 32 | NM_003406 |
| PIK3R1 | 33 | p85alpha | 34 | NM_181523 |
| PIK3R2 | 35 | p85beta | 36 | NM_005027 |
| CBL | 37 | c-Cbl | 38 | NM_005188 |
| CBLB | 39 | Cblb | 40 | NM_170662 |
| CBLC | 41 | Cblc | 42 | NM_012116 |
| RGS4 | 43 | Rgs4 | 44 | NM_005613 |
| PLCG1 | 45 | PlCgamma1 | 46 | NM_002660 |
| PTPN1 | 47 | Ptp-1B | 48 | NM_002827 |
| SH3KBP1 | 49 | Cin85 | 50 | NM_031892 |
| TENC1 | 51 | tensin1 | 52 | NM_015319 |
| RICS | 53 | Grit | 54 | NM_014715 |
| GNB2L1 | 55 | Rack1 | 56 | NM_006098 |
| RGS19IP1 | 57 | Gipc | 58 | NM_005716 |
| AHSG | 59 | Alpha2-HSG | 60 | NM_001622 |
| MAGED1 | 61 | NRAGE | 62 | NM_001005332 |
| ABL1 | 63 | c-abl | 64 | NM_005157 |
| ERBB2IP | 65 | Erbin | 66 | NM_001006600 |
| DLG4 | 67 | PSD95 | 68 | NM_001365 |
| ENPP1 | 69 | PC-1 | 70 | NM_006208 |
| FLJ14768 | 71 | Fiz1 | 72 | NM_032836 |
| RPL13A | 73 | p23 | 74 | NM_012423 |
| CAV1 | 75 | caveolin | 76 | NM_001753 |
| CSK | 77 | c-src | 78 | NM_004383 |
| IRS1 | 79 | IRS-1 | 80 | NM_005544 |
| RASA1 | 81 | Gap | 82 | NM_002890 |
| VAV1 | 83 | Vav1 | 84 | NM_005428 |
| VAV2 | 85 | Vav2 | 86 | NM_003371 |
| VAV3 | 87 | Vav3 | 88 | NM_006133 |
| CRK | 89 | Crk | 90 | NM_005206 |
| NCK1 | 91 | Nck1 | 92 | NM_006153 |
| NCK2 | 93 | Nck2 | 94 | NM_003581 |
| PTPN6 | 95 | Shp1 | 96 | NM_002831 |
| LCP2 | 97 | Slp76 | 98 | NM_005565 |
| SH2D1A | 99 | Sap | 100 | NM_002351 |
| SOCS1 | 101 | Socs1 | 102 | NM_003745 |
| SOCS2 | 103 | Socs2 | 104 | NM_003877 |
| SOCS3 | 105 | Socs3 | 106 | NM_003955 |
| SOCS4 | 107 | Socs4 | 108 | NM_080867 |
| SHCP46 | 229 | Shcp46 | 230 | |

[0107] TABLE 2
Human RTK family

| | | | NCBI | Gene | Protein |
|---|---|---|---|---|---|
| Sub- | | | Accession | SEQ ID | SEQ ID |
| family | Gene | Synonyms | Number | NO. | NO. |
| EGFR | EGFR | HER | NM_005228 | 109 | 110 |
| | ERBB2 | HER2 | M11730.1 | 111 | 112 |
| | ERBB3 | HER3 | NM_001982.1 | 113 | 114 |
| | ERBB4 | HER4 | NM_005235.1 | 115 | 116 |
| INSR | IGF1R | JTK13 | NM_000875 | 117 | 118 |
| | INSR | IR | NM_000208.1 | 119 | 120 |
| | INSRR | IRR | NM_014215 | 121 | 122 |
| PDGFR | FLT3 | FLK2 | NM_004119 | 123 | 124 |
| | CSF1R | FMS | NM_005211 | 125 | 126 |
| | KIT | CKIT | NM_000222 | 127 | 128 |
| | PDGFRA | | NM_006206 | 129 | 130 |
| | PDGFRB | JTK12 | J03278 | 131 | 132 |
| FGFR | FGFR1 | FLT2 | NM_023105 | 133 | 134 |
| | FGFR2 | KGFR | NM_023030 | 135 | 136 |
| | FGFR3 | HBGFR | NM_000142 | 137 | 138 |
| | FGFR4 | | NM_002011 | 139 | 140 |
| VEGFR | VEGFR1 | FLT1 | NM_002019 | 141 | 142 |
| | VEGFR2 | FLK1 | NM_002253 | 143 | 144 |
| | VEGFR3 | FLT4 | NM_182925 | 145 | 146 |
| EPH | EPHA1 | EPH | NM_005232.2 | 147 | 148 |
| | EPHA2 | ECK | NM_004431.2 | 149 | 150 |
| | EPHA3 | HEK | NM_005233.3 | 151 | 152 |
| | EPHA4 | SEK1 | NM_004438.3 | 153 | 154 |
| | EPHA5 | EHK1 | L36644 | 155 | 156 |
| | EPHA6 | EHK2 | AL133666 | 157 | 158 |
| | EPHA7 | MDK1 | NM_004440.2 | 159 | 160 |
| | EPHA8 | EEK | NM_020526.3 | 161 | 162 |
| | EPHB1 | ELK | NM_004441.2 | 163 | 164 |
| | EPHB2 | NUK | NM_004442.4 | 165 | 166 |
| | EPHB3 | HEK2 | NM_004443 | 167 | 168 |
| | EPHB4 | HTK | NM_004444 | 169 | 170 |
| | EPHB5 | CEK9 | not yet | | |
| | | | found in | | |
| | | | human | | |
| | EPHB6 | MEP | NM_004445 | 171 | 172 |
| TRK | NTRK1 | TRKA | M23102 | 173 | 174 |
| | NTRK2 | TRKB | AF400441.1 | 175 | 176 |
| | NTRK3 | TRKC | U05012.1 | 177 | 178 |
| | p75 | NGFR | NM_002507.1 | 179 | 180 |
| AXL | AXL | UFO | NM_021913 | 181 | 182 |
| | MER | NYK | NM_006343 | 183 | 184 |
| | TYR03 | SKY | NM_006293 | 185 | 186 |
| TIE | TIE1 | TIE | NM_005424 | 187 | 188 |
| | TIE2 | TEK | NM_000459 | 189 | 190 |
| MET | MET | HGFR | J02958 | 191 | 192 |
| | RON | MST1R | NM_002447 | 193 | 194 |
| DDR | DDR1 | CAK | NM_013993 | 195 | 196 |
| | DDR2 | TKT | NM_006182 | 197 | 198 |
| RET | RET | MEN2A/B | X12949 | 199 | 200 |
| ROS | ROS1 | MCF3 | NM_002944 | 201 | 202 |
| ALK | ALK | Ki1 | NM_004304 | 203 | 204 |
| | LTK | TYK1 | NM_002344 | 205 | 206 |
| ROR | ROR1 | NTRKR1 | NM_005012 | 207 | 208 |
| | ROR2 | NTRKR2 | NM_004560 | 209 | 210 |
| RYK | RYK | | S59184 | 211 | 212 |
| PTK7 | PTK7 | CCK4 | NM_002821 | 213 | 214 |
| MUSK | MUSK | | NM_005592 | 215 | 216 |

### EXAMPLES

[0108] The invention described and claimed herein is not to be limited in scope by the specific embodiments herein disclosed, since these embodiments are intended as illustrations of several aspects of the invention. Any equivalent embodiments are intended within the scope of this invention. Indeed, various modifications of the embodiments in addition to those shown and described herein will become apparent to those skilled in the art from the foregoing description. The appended claims are intended to cover such modifications.

[0109] The present invention is further described in the following Examples, that are not in any way intended to limit the scope of the invention as claimed.

### Example 1

### General Protocol for Using BRET to Detect Agonist and Antagonist Activities on Receptor Tyrosine Kinases

[0110] In vivo assays in cells expressing BDM tagged receptor RTK proteins and FAM tagged signaling proteins were developed to detect the effects of various types of compounds on RTK activity.

[0111] Recombinant DNA techniques are used to isolate a nucleic acid encoding an RTK from any source, for example, any of the RTK's listed in Table 2. Standard recombinant DNA protocols are used to clone the nucleic acids encoding the RTK into any plasmid that facilitates the expression of an in frame fusion of the RTK to a bioluminescent donor moiety.

[0112] Recombinant DNA techniques are used to isolate a nucleic acid encoding a signaling protein from any source, for example, any of the signaling proteins listed in Table 1. Standard recombinant DNA protocols are used to clone the nucleic acid encoding the signaling molecule into any plasmid that facilitates the expression of an in frame fusion of the signaling protein to a fluorescent acceptor moiety.

[0113] Any means now known or discovered in the future are used to co-introduce the expression constructs into a host cell. The host cells are propagated using known culturing methods, and both fusion proteins are co-expressed in the recombinant host cells.

[0114] To detect agonist activity, samples of the transfected cells are added to a 96-well plate (Costar 3912). Various concentrations of known agonists or test compounds are added to the wells with the cell samples. Following a short incubation period, for example about 20 minutes, the BRET reaction is started by adding substrate (for example coelenteracine), to the cell sample. The emission of light at various wavelengths is measured on a Mithras LB940 plate reader (Berthold, Germany) or instrument with similar capabilities. For example, BRET optimized filters (Berthold, Germany) are used to detect luciferase emission at 395 nm and flourescent emission at 510 nm wavelength. The emissions are measured for one second each. Data from the BRT BRET assays are fit to the equation R=D+(A−D)/(1+(x/c)), where A+minimum response, D=maximum response and c=EC50 (R=response, x=concentration of ligand) using the Prism 4.0 software (GraphPad Software, Dan Diego, Calif., USA). The readings from three wells is used to generate each data point. The data points for cells treated with test compounds is compared to the data points for cells not treated with known agonists or antagonists. A comparison of the BRET signals to untreated cells, or cells treated with known agonists or antagonists, is used to characterize the test compound as a ligand, as well as if the ligand is an agonist, antagonist, or inverse agonist of the RTK.

[0115] To detect antagonist activity, samples of the transfected cells are added to a 96 well plate. A known agonist is added to the cells, and the cells are incubated for a period of time, such as for 10 minutes. Following incubation with the known agonist, various concentrations of a known antagonist or test compound are added to the cell samples. Cells are incubated with the known antagonist or test compound, for example for 10 minutes. Following a short incubation period, for example about 20 minutes, the BRET reaction is started by adding substrate (for example coelenteracine), to the cell sample. The emission of light at various wavelengths is measured on a Mithras LB940 plate reader (Berthold, Germany) or instrument with similar capabilities. For example, BRET optimized filters (Berthold, Germany) are used to detect luciferase emission at 395 nm and fluorescent emission at 510 nm wavelength. The emissions are measured for one second each. Data from the BRT BRET assays are fit to the equation R=D+(A−D)/(1+(x/c)), where A+minimum response, D=maximum response and c=EC50 (R=response, x=concentration of ligand) using the Prism 4.0 software (GraphPad Software, Dan Diego, Calif., USA). The readings from three wells are used to generate each data point. The data points for cells treated with test compounds are compared to the data points for cells not treated with known agonists. A comparison of the BRET signals to untreated cells, or cells treated with known agonists, is used to characterize the test compound as a ligand, as well as if the ligand is an antagonist of the RTK.

[0116] To detect inverse agonist activity, recombinant DNA techniques are used to isolate a nucleic acid encoding an RTK with constitutive activity (i.e., in an active state in the absence of ligand binding) from any source, for example, any of the RTK's listed in Table 2. Standard recombinant DNA protocols are used to clone nucleic acids encoding the constitutive RTK into any plasmid that facilitates the expression of an in frame fusion of the constitutive RTK to a bioluminescent donor moiety.

[0117] Recombinant DNA techniques are used to isolate a nucleic acid encoding a signaling protein from any source, for example, any of the signaling proteins listed in Table 1. Standard recombinant DNA protocols are used to the signaling molecule PCR products into any plasmid that facilitates the expression of an in frame fusion of the signaling protein to a fluorescent acceptor moiety.

[0118] The expression constructs encoding the constitutive RTK fusion and the signaling protein fusion are co-introduced into a host cell. The co-transfected host cells are propagated using known culturing methods, and both fusion proteins are co-expressed in the recombinant host cells. Samples of the transfected cells are added to a 96 well plate. Parallel samples are cells are either untreated, or incubated with a test compound. Following a short incubation period, for example about 20 minutes, the BRET reaction is started by adding substrate (for example coelenteracine), to the cell sample. The emission of light at various wavelengths is measured on a Mithras LB940 plate reader (Berthold, Germany) or instrument with similar capabilities. For example, BRET optimized filters (Berthold, Germany) are used to detect luciferase emission at 395 nm and fluorescent emission at 510 nm wavelength. The emissions are measured for one second each. Data from the BRT BRET assays are fit to the equation R=D+(A−D)/(1+(x/c)), where A+minimum response, D=maximum response and c=EC50 (R=response, x=concentration of ligand) using the Prism 4.0 software (GraphPad Software, Dan Diego, Calif., USA). The readings from three wells are used to generate each data point. The data points for cells treated with test compounds are compared to the data points for cells not treated with known agonists. A comparison of the BRET signal of cells treated with test compound to untreated cells is used to characterize the test compound as an inverse agonist of the RTK.

[0119] To determine whether a compound functions as a selective modulator of a particular an RTK, two sets of recombinant cells are constructed. Standard recombinant DNA methods described above are used to construct an expression vector encoding an RTK from any source, for example, any of the RTK's listed in Table 2. Nucleic acids encoding the RTK are cloned into any plasmid that facilitates the expression of an in frame fusion of the RTK to a bioluminescent donor moiety. Methods described above are used to construct at least two different expression vectors for the expression of an in frame fusions of signaling proteins from any source, for example, any of the signaling proteins listed in Table 1, to a fluorescent acceptor moiety.

[0120] Cells are co-transfected with the RTK fusion and one of the expression constructs using methods described above, to create recombinant cells that express different RTK/signaling protein fusion pairs. Recombinant host cells with different pairs of RTK/signaling fusions are propagated as described above. For each type of recombinant host cell with a particular RTK/signaling protein fusion pair, parallel cell samples are added to a 96 well plate. For each type of recombinant host cell, parallel cell samples are analyzed by incubating some samples with a test compound, and incubating parallel samples under the same conditions without the addition of a test compound. The BRET assay is initiated and performed as described above on all cell samples. For each type of recombinant cell (i.e., that is co-transfected with the RTK and different signaling protein fusions), the effect of the addition of test compound to recombinant cells harboring one type of RTK/signaling molecule fusion pair is measured by comparing the BRET signal in cell samples treated or untreated with test compound. The effect of the test compound on each type of recombinant cell (e.g., each RTK/signaling pair) is compared. The comparison is used to characterize the test compound as a selective modulator, if the test compound has differential effects on the BRET signal for the different type of cells.

### Example 2

### Protocol for Using BRET to Detect Agonist and Antagonist Activities on the EGFR Receptor Tyrosine Kinase

[0121] EGFR is a membrane localized receptor tyrosine kinase, which autophosphorylates several tyrosine residues in the intracellular carboxyl-terminus upon activation by the epidermal growth factor (EGF) (Holbro and Hynes 2004) (Mass 2004). These phosphorylated tyrosine residues serve as docking sites for various signaling molecules that are involved in mediating signals downstream into the cell. The epidermal growth factor receptor biding protein 2 (Grb2) is a SH2 and SH3 domain containing RTK signaling protein that binds to phosphorylated tyrosine residues in the carboxyl terminus of EGFR and that links EGFR activity to the RAS/MAP kinase-signaling pathway (Pawson 1995). STAT5A is another signaling protein that interacts with EGFR RTK.

[0122] To create an EFGR-luciferase fusion protein (SEQ ID NO: 226), Pfu Turbo polymerase (Stratagene, USA) was used in a polymerase chain reaction to arnplify EGFR cDNA. Total RNA derived from the cancer cell line PC-3 (Ambion, USA) was used as the template DNA. The primers EGFR.LucN3.S (CAGCGGCTAGCGCGATGCGACCCTCCGGG)(SEQ ID NO:227) and EGFR.LucN3.AS (CAGCTGGTACCTGCTCCAATAAATTCACTGCTTTG)(SEQ ID NO:228) were used in the PCR reaction. The EGFR.LucN3.AS primer eliminates the EGFR cDNA stop codon to to facilitate the creation of an in frame fusion to the luciferase protein. The PCR product was cloned directly into the TOPO™ vector pCR2.1 (Invitrogen) to create pTOPO-EGFR. pTOPO-EGFR was digested with NheI and KpnI. The EGFR DNA insert was isolated and ligated into the NheI and KpnI sites of the luciferase plasmid pRLucN3 (Perkin Elmer). The final plasmid contains a nucleic acid encoding an in-frame carboxy-terminal EGFR-Renilla luciferase fusion protein (SEQ ID NO: 225; SEQ ID NO:226). The resulting fusion protein EGFR-luciferase behaves functionally identical to the non-tagged EGFR (data not shown).

[0123] To create the GRB2-GFP fusion protein (SEQ ID NO:217), GRB2 cDNA was amplified by PCR using Pfu Turbo polymerase (Stratagene, USA) with the following primers: GRB2.GFP2.S (CAGCGGAATTCGGAATGGAAGCCATCGCCAAATATG)(SEQ ID NO:219) and GRB2.GFP2.AS (CAGCTCCGCGGTTAGACGTTCCGGTTCACGGGG)(SEQ ID NO:220) The GRB2.GFP2.AS primer is engineered to eliminate the GRB2 cDNA stop codon to facilitate the creation of an in frame fusion to the GFP2 protein. The PCR product was subcloned blunt ended into the TOPO™ vector pCR2.1 (Invitrogen, Carlsbad, Calif.), to create pGRB2-TOPO. pGRB2-TOPO was digested with EcoRI and SacII and the Grb2 fragment was isolated. The isolated GRB2 DNA was ligated into the EcoRI and SacII sites of pGFP2C™ plasmid (Perkin Elmer) to yield pGFP2-Grb2. pGFP2-Grb2 contains a nucleic acid (SEQ ID NO:217) which encodes GFP-Grb2 (SEQ IDNO:218).

[0124] To create the SHCP46-GFP fusion protein, Shcp46 cDNA was amplified by PCR using Pfu Turbo polymerase (Stratagene, USA) with the following primers: SHCP46.GFP2.S(CAGCGGAGCTCGTCATGGGACCTGGGGTTTCC)(SEQ ID NO:223) and SHCP46.GFP2.AS (CAGCTGGTACCTCACACTTTCCGATCCACGG)(SEQ ID NO:224) The SHCP46.GFP2.AS primer is engineered to eliminate the SHCP46 cDNA stop codon to facilitate the creation of an in frame fusion to the GFP2 protein. The PCR product was subcloned blunt ended into the TOPO™ vector pCR2.1 (Invitrogen, Carlsbad, Calif.), to create pSHCP46-TOPO. pSHCP46-TOPO was digested with SacI and KpnI and the Shcp46 fragment was isolated. The isolated SHCP46 DNA was ligated into the SacI and KpnI sites of pGFP2C3™ plasmid (Perkin Elmer) to yield pGFP2C3-SHCP46. pGFP2C3-SHCP46 includes a nucleic acid (SEQ ID NO:221) which encodes the GFP2-Shcp46 fusion protein. (SEQ ID NO:222).

[0125] To create the STAT5A-GFP fusion, Pfu Turbo polymerase (Stratagene) was used to was used to amplify STAT5A cDNA. The PCR product of the STAT5A coding sequence were cloned into pGFP2-N vector (Biosignal Packard, USA). STAT5A was cloned so that the vector would express a carboxy-terminal STAT5A-GFP2 fusion protein. To create the STAT5A-GFP fusion protein, STAT5 cDNA was amplified by PCR using Pfu Turbo polymerase (Stratagene, USA) with the following primers: STAT5A.GFP2. S(CAGCGGAGCTCGTCATGGGACCTGGGGTTTCC)(SEQ ID NO:233) and STAT5A.GFP2N.S (CAGCTGGTACCTCACACTTTCCGATCCACGG) (SEQ ID NO:234) The STAT5A.GFP2N.AS primer is engineered to eliminate the STAT5A cDNA stop codon to facilitate the creation of an in frame fusion to the GFP2 protein. The PCR product was subcloned blunt ended into the TOPO™ vector pCR2.1 (Invitrogen, Carlsbad, Calif.), to create pSHCP46-TOPO. pSIICP46-TOPO was digested with BgIII and HindIII and the Stat5A fragment was isolated. The isolated STAT5A DNA was ligated into the BgIII and HindIII sites of pGFP2N3™ plasmid (Perkin Elmer) to yield pGFP2N3-SHCP46. pGFP2N3-STAT5A includes a nucleic acid (SEQ ID NO:231) which encodes the GFP2-STAT5A fusion protein. (SEQ ID NO:232).

[0126] To assess the ability of BRET to detect interactions of EGFR with known signaling proteins, HEK293T cells were co-transfected with EGFR-Rluc and one of GFP2-Grb2, GFP2-Shcp46, or STAT5A-GFP2 fusion proteins. Two days prior to transfection, HEK293 cells were plated in 10 ml complete DMEM medium at 2×10⁶ cells/10 cm culture dish (Falcon 3003). Cells were transiently transfected using Superfect® (Qiagen) according to the manufacturer's instructions using 2.5 ug EGFR-RLuc DNA with either 40 ug of GFP-Grb2 or GFP-Shcp46, or STAT5A-GFP DNA, respectively. One day after transfection media was changed. Two days after transfection cells were washed once with D-PBS (GIBCO, 14287-080) and 3 ml PBS (with 5 mM EDTA) added. Cells were harvested from the dishes with a cell scraper, washed twice with D-PBS and resuspended to 2×10⁶ cells/ml. Costar 3912, non-treated, white polystyrene, 96-well plates were used for the assay.

[0127] To detect agonist activity, 1×10⁶ cells in a 50 μl volume were added per well to the 96-well plate. Various concentrations of EGF (Peprotech, USA) were added to the wells in a 50 μl volume. Cells were incubated for 20 minutes. To detect antagonist activity, 1×10⁶ cells in a 50 μl volume were added per well to the 96-well plate. 25 μl of agonist (EGF), in a final concentration of 2 nM was added to each well. Cells were incubated for 10 minutes. Various concentrations of the EGFR antagonist Iressa were added to the wells in a 25 ∞l volume. Cells were incubated for 10 minutes.

[0128] 50 μl coelenteracine 400A (Biotium) (5 μM final concentration) was injected into each well to activate the luciferase and initiate the BRET reading. Detection of luminescence emissions from luciferase and GFP2 were performed on a Mithras LB940 plate reader (Berthold, Germany). BRET optimized filters (Berthold, Germany) were used to detect luciferase emission at 395 nm and GFP2 emission at 510 nm wavelength. The luciferase and GFP2 emissions were measured for one second each. Dose response data from the BRT BRET assays were fit to the equation R=D+(A−D)/(1+(x/c)), where A+minimum response, D=maximum response and c=EC50 (R=response, x=concentration of ligand) using the Prism 4.0 software (GraphPad Software, Dan Diego, Calif., USA). All data points represent the mean of three wells.

[0129] Dose responses are obtained for the EGFR agonist EGF and the EGFR antagonist Iressa (gefitinib) in activating or inhibiting EGFR activity. (FIGS. 4 and 5).

### Example 3

### Applicability of BRET to Identify Ligands That Activate Specific Signaling Pathways

[0130] This example demonstrates the utility of BRET technology to detect agonist and antagonist activity on specific RTK signaling pathways. GFP2-Shcp46 and STAT5A-GFP expression vectors are described in Example 1. HEK293T cells were cultured as described in Example 1. Cells were co-transfected with 2.5 μg of EGFR-Rluc and 40 μg of GFP2-GShcp46 or STAT5A-GFP2 vector DNA as described in Example 1. Agonist and antagonist activity is assessed as described in Example 1.

[0131] A dose-dependent profile as measured by BRET readings when cells co-expressing EGFR-Rluc and either GFP2-Shcp46 or STAT5A-GFP2, are contacted with varying concentrations of EGFR agonist. (FIG. 10, FIG. 12). FIG. 11 shows a dose-dependent profile as measured by BRET readings when cells co-expressing EGFR-Rluc and GFP2-Shcp46 are treated with varying concentrations of the EGFR antagonist Iressa (gefitinib). The data in FIGS. 10-12 illustrate that a wide variety of RTK signaling proteins can be used in the assay described above. These data also demonstrate that the RTK BRET assay can be utilized to detect signal pathway specific RTK activity.

### Example 4

### Stability of BRET Signal

[0132] To test the stability of the signal generated in the RTK BRET assay described herein, HEK293 were cultured and co-transfected with EGFR-Rluc and GFP2-Grb2 expression vectors as described in Example 1. Agonist and antagonist assays were performed as described in Example 1. Following initiation of the reaction by the addition of substrate, luminescence emissions from luciferase and GFP2 were measured as described in Example 1 at various timepoints (FIG. 6), after 24 hours (FIG. 7, FIG. 8), or after 26.5 hours (FIG. 9). EGFR mediated BRET signal is stable for more than 24 hours and is still inhibited by the EGFR antagonist Iressa (geniftib) (FIGS. 6, 7, 8 and 9). After 24 hours, EGF and EGF+Iressa (geniftib) continue to show dose-dependent affects on BRET signal. (FIG. 7, FIG. 8). The stability of the BRET signal, as well as the retention of the ability to detect dose-dependent signal renders the BRET assay attractive for screening large compound libraries to identify potential ligands for RTKs, which typically involve long incubation times to prepare mixes of transfected cells and large numbers of test compounds in screening plates.

[0133] The disclosures of each of the following references are herein incorporated by reference in their entirety.

### REFERENCES

[0134] Akin C, Metcalfe D D. 2004. The biology of Kit in disease and the application of pharmacogenetics. J Allergy Clin Immunol 114(1):13-9; quiz 20.
[0135] Bar-Sagi D, Hall A. 2000. Ras and Rho GTPases: a family reunion. Cell 103(2):227-38.
[0136] Bellamy W T. 1992. Prediction of response to drug therapy of cancer. A review of in vitro assays. Drugs 44(5):690-708.
[0137] Bertrand L, Parent S, Caron M, Legault M, Joly E, Angers S, Bouvier M, Brown M, Houle B, Menard L. 2002. The BRET2/arrestin assay in stable recombinant cells: a platform to screen for compounds that interact with G protein-coupled receptors (GPCRS). J Recept Signal Transduct Res 22(1-4):533-41.
[0138] Blume-Jensen P, Hunter T. 2001. Oncogenic kinase signalling. Nature 411(6835):355-65.
[0139] Corfas G, Roy K, Buxbaum J D. 2004. Neuregulin 1-erbB signaling and the molecular/cellular basis of schizophrenia. Nat Neurosci 7(6):575-80.
[0140] Cunningham M E, Greene L A. 1998. A function-structure model for NGF-activated TRK. Embo J 17(24):7282-93.
[0141] Darnell J E, Jr., Kerr I M, Stark G R. 1994. Jak-STAT pathways and transcriptional activation in response to IFNs and other extracellular signaling proteins. Science 264(5164):1415-21.
[0142] Downward J. 2004. PI 3-kinase, Akt and cell survival. Semin Cell Dev Biol 15(2):177-82.
[0143] Dupriez V J, Maes K, Le Poul E, Burgeon E, Detheux M. 2002. Aequorin-based functional assays for G-protein-coupled receptors, ion channels, and tyrosine kinase receptors. Receptors Channels 8(5-6):319-30.
[0144] Farmer G. 2004. Targeted lung cancer therapies. Nat Rev Drug Discov 3(7):547-8.
[0145] Garrington T P, Johnson G L. 1999. Organization and regulation of mitogen-activated protein kinase signaling pathways. Curr Opin Cell Biol 11(2):211-8.
[0146] Gross M E, Shazer R L, Agus D B. 2004. Targeting the HER-kinase axis in cancer. Semin Oncol 31(1 Suppl 3):9-20.
[0147] Haluska P, Adjei A A. 2001. Receptor tyrosine kinase inhibitors. Curr Opin Investig Drugs 2(2):280-6.
[0148] Hart R C, Matthews J C, Hori K, Cormier M J. 1979. Renilla reniformis bioluminescence: luciferase-catalyzed production of nonradiating excited states from luciferin analogues and elucidation of the excited state species involved in energy transfer to Renilla green fluorescent protein. Biochemistry 18(11):2204-10.
[0149] Heding A. 2004. Use of the BRET 7TM receptor/beta-arrestin assay in drug discovery and screening. Expert Rev Mol Diagn 4(3):403-11.
[0150] Heldin C H. 1995. Dimerization of cell surface receptors in signal transduction. Cell 80(2):213-23.
[0151] Holbro T, Hynes N E. 2004. ErbB receptors: directing key signaling networks throughout life. Annu Rev Pharmacol Toxicol 44:195-217.
[0152] Hubbard SR, Till J H. 2000. Protein tyrosine kinase structure and function. Annu Rev Biochem 69:373-98.
[0153] Hunter T. 1998. The role of tyrosine phosphorylation in cell growth and disease. Harvey Lect 94:81-119.
[0154] Hunter T. 2000. Signaling-2000 and beyond. Cell 100(1):113-27.
[0155] Karin M, Hunter T. 1995. Transcriptional control by protein phosphorylation: signal transmission from the cell surface to the nucleus. Curr Biol 5(7):747-57.
[0156] Kenakin T. 1999. The measurement of efficacy in the drug discovery agonist selection process. J Pharmacol Toxicol Methods 42(4):177-87.
[0157] Lin N U, Winer E P. 2004. New targets for therapy in breast cancer: small molecule tyrosine kinase inhibitors. Breast Cancer Res 6(5):204-10.
[0158] Lorenz W W, McCann R O, Longiaru M, Cormier M J. 1991. Isolation and expression of a cDNA encoding Renilla reniformis luciferase. Proc Nati Acad Sci USA 88(10):4438-42.
[0159] Mass R D. 2004. The HER receptor family: a rich target for therapeutic development. Int J Radiat Oncol Biol Phys 58(3):932-40.
[0160] McDonald N Q, Murray-Rust J, Blundell T L. 1995. The first structure of a receptor tyrosine kinase domain: a further step in understanding the molecular basis of insulin action. Structure 3(l):1-6.
[0161] Mosmann T. 1983. Rapid calorimetric assay for cellular growth and survival: application to proliferation and cytotoxicity assays. J Immunol Methods 65(1-2):55-63.
[0162] Muller-Tidow C, Schwable J, Steffen B, Tidow N, Brandt B, Becker K, Schulze-Bahr E, Halfter H, Vogt U, Metzger R and others. 2004. High-throughput analysis of genome-wide receptor tyrosine kinase expression in human cancers identifies potential novel drug targets. Clin Cancer Res 10(4):1241-9.
[0163] Olive D M. 2004. Quantitative methods for the analysis of protein phosphorylation in drug development. Expert Rev Proteomics 1 (3):327-341.
[0164] Pawson T. 1995. Protein modules and signalling networks. Nature 373(6515):573-80.
[0165] Pawson T. 2002. Regulation and targets of receptor tyrosine kinases. Eur J Cancer 38 Suppl 5:S3-10.
[0166] Pawson T, Olivier P, Rozakis-Adcock M, McGlade J, Henkemeyer M. 1993. Proteins with SH2 and SH3 domains couple receptor tyrosine kinases to intracellular signalling pathways. Philos Trans R Soc Lond B Biol Sci 340(1293):279-85.
[0167] Pawson T, Schlessingert J. 1993. SH2 and SH3 domains. Curr Biol 3(7):434-42.
[0168] Pelicci G, Lanfrancone L, Grignani F, McGlade J, Cavallo F, Forni G, Nicoletti I, Pawson T, Pelicci P G. 1992. A novel transforming protein (SHC) with an SH2 domain is implicated in mitogenic signal transduction. Cell 70(1):93-104.
[0169] Prenzel N, Zwick E, Leserer M, Ullrich A. 2000. Tyrosine kinase signalling in breast cancer. Epidermal growth factor receptor: convergence point for signal integration and diversification. Breast Cancer Res 2(3): 184-90.
[0170] Robinson D R, Wu Y M, Lin S F. 2000. The protein tyrosine kinase family of the human genome. Oncogene 19(49):5548-57.
[0171] Sawyer T K, Bohacek R S, Metcalf C A, 3rd, Shakespeare W C, Wang Y, Sundaramoorthi R, Keenan T, Narula S, Weigele M, Dalgarno D C. 2003. Novel protein kinase inhibitors: SMART drug design technology. Biotechniques Suppl:2-10, 12-5.
[0172] Schlessinger J. 2000. Cell signaling by receptor tyrosine kinases. Cell 103(2):211-25.
[0173] Shawver L K, Slamon D, Ulirich A. 2002. Smart drugs: tyrosine kinase inhibitors in cancer therapy. Cancer Cell 1(2):117-23.
[0174] Silva C M. 2004. Role of STATs as downstream signal transducers in Src family kinase-mediated tumorigenesis. Oncogene 23(48):8017-23.
[0175] Tsien R Y. 1998. The green fluorescent protein. Annu Rev Biochem 67:509-44.
[0176] Ullrich A, Schlessinger J. 1990. Signal transduction by receptors with tyrosine kinase activity. Cell 61(2):203-12.
[0177] Verheul H M, Pinedo H M. 2003. Vascular endothelial growth factor and its inhibitors. Drugs Today (Barc) 39 Suppl C:81-93.
[0178] Vrecl M, Jorgensen R, Pogacnik A, Heding A. 2004. Development of a BRET2 screening assay using beta-arrestin 2 mutants. J Biomol Screen 9(4):322-33.
[0179] Ward W W, Cormier M J. 1979. An energy transfer protein in coelenterate bioluminescence. Characterization of the Renilla green-fluorescent protein. J Biol Chem 254(3):781-8.
[0180] Xu Y, Piston D W, Johnson C H. 1999. A bioluminescence resonance energy transfer (BRET) system: application to interacting circadian clock proteins. Proc Natl Acad Sci USA 96(1):151-6.

The application's sequence listing, which the Patent Office published only in electronic form, follows.

SEQUENCE LISTING (234 sequences)

SEQ ID NO: 1 - DNA, 654 bp, Homo sapiens
  Coding sequence for GRB2
atggaagccatcgccaaatatgacttcaaagctactgcagacgacgagctgagcttcaaaaggggggacatcctcaaggttttgaacgaagaatgtgatcagaactggtacaaggcagagcttaatggaaaagacggcttcattcccaagaactacatagaaatgaaaccacatccgtggttttttggcaaaatccccagagccaaggcagaagaaatgcttagcaaacagcggcacgatggggcctttcttatccgagagagtgagagcgctcctggggacttctccctctctgtcaagtttggaaacgatgtgcagcacttcaaggtgctccgagatggagccgggaagtacttcctctgggtggtgaagttcaattctttgaatgagctggtggattatcacagatctacatctgtctccagaaaccagcagatattcctgcgggacatagaacaggtgccacagcagccgacatacgtccaggccctctttgactttgatccccaggaggatggagagctgggcttccgccggggagattttatccatgtcatggataactcagaccccaactggtggaaaggagcttgccacgggcagaccggcatgtttccccgcaattatgtcacccccgtgaaccggaacgtctaa

SEQ ID NO: 2 - protein, 217 aa, Homo sapiens [sequence omitted]

SEQ ID NO: 3 - DNA, 1143 bp, Homo sapiens
  Coding sequence for GRB4
atgacagaagaagttattgtgatagccaagtgggactacaccgcccagcaggaccaggagctggacatcaagaagaacgagcggctgtggttgctggacgactccaagacgtggtggcgggtgaggaacgcggccaacaggacgggctatgtaccgtccaactacgtggagcggaagaacagcctgaagaagggctccctcgtgaagaacctgaaggacacactaggcctcggcaagacgcgcaggaagaccagcgcgcgggatgcgtcccccacgcccagcacggacgccgagtaccccgccaatggcagcggcgccgaccgcatctacgacctcaacatcccggccttcgtcaagttcgcctatgtggccgagcgggaggatgagttgtccctggtgaaggggtcgcgcgtcaccgtcatggagaagtgcagcgacggttggtggcggggcagctacaacgggcagatcggctggttcccctccaactacgtcttggaggaggtggacgaggcggctgcggagtccccaagcttcctgagcctgcgcaagggcgcctcgctgagcaatggccagggctcccgcgtgctgcatgtggtccagacgctgtaccccttcagctcagtcaccgaggaggagctcaacttcgagaagggggagaccatggaggtgattgagaagccggagaacgaccccgagtggtggaaatgcaaaaatgcccggggccaggtgggcctcgtccccaaaaactacgtggtggtcctcagtgacgggcctgccctgcaccctgcgcacgccccacagataagctacaccgggccctcgtccagcgggcgcttcgcgggcagagagtggtactacgggaacgtgacgcggcaccaggccgagtgcgccctcaacgagcggggcgtggagggcgacttcctcattagggacagcgagtcctcgcccagcgacttctccgtgtcccttaaagcgtcagggaagaacaaacacttcaaggtgcagctcgtggacaatgtctactgcattgggcagcggcgcttccacaccatggacgagctggtggaacactacaaaaaggcgcccatcttcaccagcgagcacggggagaagctctacctcgtcagggccctgcagtga

SEQ ID NO: 4 - protein, 380 aa, Homo sapiens
  Amino acid sequence of grb4
MTEEVIVIAKWDYTAQQDQELDIKKNERLWLLDDSKTWWRVRNAANRTGYVPSNYVERKNSLKKGSLVKNLKDTLGLGKTRRKTSARDASPTPSTDAEYPANGSGADRIYDLNIPAFVKFAYVAEREDELSLVKGSRVTVMEKCSDGWWRGSYNGQIGWFPSNYVLEEVDEAAAESPSFLSLRKGASLSNGQGSRVLHVVQTLYPFSSVTEEELNFEKGETMEVIEKPENDPEWWKCKNARGQVGLVPKNYVVVLSDGPALHPAHAPQISYTGPSSSGRFAGREWYYGNVTRHQAECALNERGVEGDFLIRDSESSPSDFSVSLKASGKNKHFKVQLVDNVYCIGQRRFHTMDELVEHYKKAPIFTSEHGEKLYLVRALQ

SEQ ID NO: 5 - DNA, 1599 bp, Homo sapiens
  Coding sequence for GRB7
atggagctggatctgtctccacctcatcttagcagctctccggaagacctttggccagcccctgggacccctcctgggactccccggccccctgatacccctctgcctgaggaggtaaagaggtcccagcctctcctcatcccaaccaccggcaggaaacttcgagaggaggagaggcgtgccacctccctcccctctatccccaaccccttccctgagctctgcagtcctccctcacagagcccaattctcgggggcccctccagtgcaagggggctgctcccccgcgatgccagccgcccccatgtagtaaaggtgtacagtgaggatggggcctgcaggtctgtggaggtggcagcaggtgccacagctcgccacgtgtgtgaaatgctggtgcagcgagctcacgccttgagcgacgagacctgggggctggtggagtgccacccccacctagcactggagcggggtttggaggaccacgagtccgtggtggaagtgcaggctgcctggcccgtgggcggagatagccgcttcgtcttccggaaaaacttcgccaagtacgaactgttcaagagctccccacactccctgttcccagaaaaaatggtctccagctgtctcgatgcacacactggtatatcccatgaagacctcatccagaacttcctgaatgctggcagctttcctgagatccagggctttctgcagctgcggggttcaggacggaagctttggaaacgctttttctgtttcttgcgccgatctggcctctattactccaccaagggcacctctaaggatccgaggcacctgcagtacgtggcagatgtgaacgagtccaacgtgtacgtggtgacgcagggccgcaagctctacgggatgcccactgacttcggtttctgtgtcaagcccaacaagcttcgaaatggacacaaggggcttcggatcttctgcagtgaagatgagcagagccgcacctgctggctggctgccttccgcctcttcaagtacggggtgcagctgtacaagaattaccagcaggcacagtctcgccatctgcatccatcttgtttgggctccccacccttgagaagtgcctcagataataccctggtggccatggacttctctggccatgctgggcgtgtcattgagaacccccgggaggctctgagtgtggccctggaggaggcccaggcctggaggaagaagacaaaccaccgcctcagcctgcccatgccagcctccggcacgagcctcagtgcagccatccaccgcacccaactctggttccacgggcgcatttcccgtgaggagagccagcggcttattggacagcagggcttggtagacggcctgttcctggtccgggagagtcagcggaacccccagggctttgtcctctctttgtgccacctgcagaaagtgaagcattatctcatcctgccgagcgaggaggagggtcgcctgtacttcagcatggatgatggccagacccgcttcactgacctgctgcagctcgtggagttccaccagctgaaccgcggcatcctgccgtgcttgctgcgccattgctgcacgcgggtggccctctga

SEQ ID NO: 6 - protein, 532 aa, Homo sapiens
  Amino acid sequence of grb7
MELDLSPPHLSSSPEDLWPAPGTPPGTPRPPDTPLPEEVKRSQPLLIPTTGRKLREEERRATSLPSIPNPFPELCSPPSQSPILGGPSSARGLLPRDASRPHVVKVYSEDGACRSVEVAAGATARHVCEMLVQRAHALSDETWGLVECHPHLALERGLEDHESVVEVQAAWPVGGDSRFVFRKNFAKYELFKSSPHSLFPEKMVSSCLDAHTGISHEDLIQNFLNAGSFPEIQGFLQLRGSGRKLWKRFFCFLRRSGLYYSTKGTSKDPRHLQYVADVNESNVYVVTQGRKLYGMPTDFGFCVKPNKLRNGHKGLRIFCSEDEQSRTCWLAAFRLFKYGVQLYKNYQQAQSRHLHPSCLGSPPLRSASDNTLVAMDFSGHAGRVIENPREALSVALEEAQAWRKKTNHRLSLPMPASGTSLSAAIHRTQLWFHGRISREESQRLIGQQGLVDGLFLVRESQRNPQGFVLSLCHLQKVKHYLILPSEEEGRLYFSMDDGQTRFTDLLQLVEFHQLNRGILPCLLRHCCTRVAL

SEQ ID NO: 7 - DNA, 1785 bp, Homo sapiens
  Coding sequence for GRB10
atggctttagccggctgcccagattcctttttgcaccatccgtactaccaggacaaggtggagcagacacctcgcagtcaacaagacccggcaggaccaggactccccgcacagtctgaccgacttgcgaatcaccaggaggatgatgtggacctggaagccctggtgaacgatatgaatgcatccctggagagcctgtactcggcctgcagcatgcagtcagacacggtgcccctcctgcagaatggccagcatgcccgcagccagcctcgggcttcaggccctcctcggtccatccagccacaggtgtccccgaggcagagggtgcagcgctcccagcctgtgcacatcctcgctgtcaggcgccttcaggaggaagaccagcagtttagaacctcatctctgccggccatccccaatccttttcctgaactctgtggccctgggagcccccctgtgctcacgccgggttctttacctccgagccaggccgccgcaaagcaggatgttaaagtctttagtgaagatgggacaagcaaagtggtggagattctagcagacatgacagccagagacctgtgccaattgctggtttacaaaagtcactgtgtggatgacaacagctggacactagtggagcaccacccgcacctaggattagagaggtgcttggaagaccatgagctggtggtccaggtggagagtaccatggccagtgagagtaaatttctattcaggaagaattacgcaaaatacgagttctttaaaaatcccatgaatttcttcccagaacagatggttacttggtgccagcagtcaaatggcagtcaaacccagcttttgcagaattttctgaactccagtagttgtcctgaaattcaagggtttttgcatgtgaaagagctgggaaagaaatcatggaaaaagctgtatgtgtgtttgcggagatctggcctttattgctccaccaagggaacttcaaaggaacccagacacctgcagctgctggccgacctggaggacagcaacatcttctccctgatcgctggcaggaagcagtacaacgcccctacagaccacgggctctgcataaagccaaacaaagtcaggaatgaaactaaagagctgaggttgctctgtgcagaggacgagcaaaccaggacgtgctggatgacagcgttcagactcctcaagtatggaatgctcctttaccagaattaccgaatccctcagcagaggaaggccttgctgtccccgttctcgacgccagtgcgcagtgtctccgagaactccctcgtggcaatggatttttctgggcaaacaggacgcgtgatagagaatccggcggaggcccagagcgcagccctggaggagggccacgcctggaggaagcgaagcacacggatgaacatcctaggtagccaaagtcccctccacccttctaccctaagtacagtgattcacaggacacagcactggtttcacgggaggatctccagggaggaatcccacaggatcattaaacagcaagggctcgtggatgggctttttctcctccgtgacagccagagtaatccaaaggcatttgtactcacactgtgtcatcaccagaaaattaaaaatttccagatcttaccttgcgaggacgacgggcagacgttcttcagcctagatgacgggaacaccaaattctctgacctgatccagctggttgacttttaccagctgaacaaaggagtcctgccttgcaaactcaagcaccactgcatccgagtggccttatga

SEQ ID NO: 8 - protein, 594 aa, Homo sapiens
  Amino acid sequence of grb10
MALAGCPDSFLHHPYYQDKVEQTPRSQQDPAGPGLPAQSDRLANHQEDDVDLEALVNDMNASLESLYSACSMQSDTVPLLQNGQHARSQPRASGPPRSIQPQVSPRQRVQRSQPVHILAVRRLQEEDQQFRTSSLPAIPNPFPELCGPGSPPVLTPGSLPPSQAAAKQDVKVFSEDGTSKVVEILADMTARDLCQLLVYKSHCVDDNSWTLVEHHPHLGLERCLEDHELVVQVESTMASESKFLFRKNYAKYEFFKNPMNFFPEQMVTWCQQSNGSQTQLLQNFLNSSSCPEIQGFLHVKELGKKSWKKLYVCLRRSGLYCSTKGTSKEPRHLQLLADLEDSNIFSLIAGRKQYNAPTDHGLCIKPNKVRNETKELRLLCAEDEQTRTCWMTAFRLLKYGMLLYQNYRIPQQRKALLSPFSTPVRSVSENSLVAMDFSGQTGRVIENPAEAQSAALEEGHAWRKRSTRMNILGSQSPLHPSTLSTVIHRTQHWFHGRISREESHRIIKQQGLVDGLFLLRDSQSNPKAFVLTLCHHQKIKNFQILPCEDDGQTFFSLDDGNTKFSDLIQLVDFYQLNKGVLPCKLKHHCIRVAL

SEQ ID NO: 9 - DNA, 1623 bp, Homo sapiens
  Coding sequence for GRB14
atgaccacttccctgcaagatgggcagagcgccgcgagcagggcggctgcccgggattcgccgctggccgcccaggtgtgtggcgctgcccaggggaggggcgacgcccacgacctggcgccggccccctggctgcacgcgcgagcgctcctgccccttccggacgggacccgcggctgtgctgcagacaggagaaaaaagaaagatcttgatgttccggaaatgccatctattccaaacccttttcctgagctatgctgttctccaattacatctgtgttgtcagcagacctatttcccaaagcaaattcaaggaaaaaacaggtgattaaagtatacagtgaagatgaaaccagcagggctttagatgtacccagtgacataacggctcgagatgtttgtcagctgttgatcctgaagaatcattacattgatgaccacagctggaccctttttgagcacctgcctcacataggtgtagaaagaacaatagaagaccacgaactggtgattgaagtgctatccaactgggggatagaagaagaaaacaaactatactttagaaaaaattatgccaaatatgagttctttaaaaacccaatgtatttttttccagagcatatggtatcttttgcaactgaaaccaatggtgaaatatcccccacacagattttgcagatgtttctgagttcaagcacatatcctgaaattcatggtttcttacatgcgaaagaacagggaaagaagtcttggaaaaaaatttacttttttctaagaagatctggtttatatttttctactaaaggaacatcaaaggaaccgcggcatttgcagtttttcagcgaatttggcaatagtgatatttatgtgtcactggcaggcaaaaaaaaacatggagcaccgactaactatggattctgctttaagcctaacaaagcgggagggccccgagacctgaaaatgctctgtgcagaagaagagcagagtaggacgtgctgggtgaccgcgattagattgcttaagtatggcatgcagctgtaccagaattatatgcatccatatcaaggtagaagtggctgcagttcacagagcatatcacctatgagaagtatatcagagaattccctggtagcaatggacttctcaggccagaaaagcagagttatagaaaatcccactgaagccctttcagttgcggttgaagaaggactcgcttggaggaaaaaaggatgtttacgcctgggcactcacggtagccccactgcctcttcacagagctctgccacaaacatggctatccaccggtcccagccatggtttcaccacaaaatttctagagatgaggctcagcgattgattattcagcaaggacttgtggatggagttttcttggtacgggatagtcagagtaaccccaaaactttcgtactgtcaatgagtcatggacaaaaaataaagcactttcaaattataccagtagaagatgacggtgaaatgttccacacactggatgatggccacacaagatttacagatctaatacagctggtggagttctatcaactcaataagggcgttcttccttgcaagttgaaacattattgtgctaggattgctctctag

SEQ ID NO: 10 - protein, 540 aa, Homo sapiens
  Amino acid sequence of grb14
MTTSLQDGQSAASRAAARDSPLAAQVCGAAQGRGDAHDLAPAPWLHARALLPLPDGTRGCAADRRKKKDLDVPEMPSIPNPFPELCCSPITSVLSADLFPKANSRKKQVIKVYSEDETSRALDVPSDITARDVCQLLILKNHYIDDHSWTLFEHLPHIGVERTIEDHELVIEVLSNWGIEEENKLYFRKNYAKYEFFKNPMYFFPEHMVSFATETNGEISPTQILQMFLSSSTYPEIHGFLHAKEQGKKSWKKIYFFLRRSGLYFSTKGTSKEPRHLQFFSEFGNSDIYVSLAGKKKHGAPTNYGFCFKPNKAGGPRDLKMLCAEEEQSRTCWVTAIRLLKYGMQLYQNYMHPYQGRSGCSSQSISPMRSISENSLVAMDFSGQKSRVIENPTEALSVAVEEGLAWRKKGCLRLGTHGSPTASSQSSATNMAIHRSQPWFHHKISRDEAQRLIIQQGLVDGVFLVRDSQSNPKTFVLSMSHGQKIKHFQIIPVEDDGEMFHTLDDGHTRFTDLIQLVEFYQLNKGVLPCKLKHYCARIAL

SEQ ID NO: 11 - DNA, 1425 bp, Homo sapiens
  Coding sequence for SHC1
atgaacaagctgagtggaggcggcgggcgcaggactcgggtggaagggggccagcttgggggcgaggagtggacccgccacgggagctttgtcaataagcccacgcggggctggctgcatcccaacgacaaagtcatgggacccggggtttcctacttggttcggtacatgggttgtgtggaggtcctccagtcaatgcgtgccctggacttcaacacccggactcaggtcaccagggaggccatcagtctggtgtgtgaggctgtgccgggtgctaagggggcgacaaggaggagaaagccctgtagccgcccgctcagctctatcctggggaggagtaacctgaaatttgctggaatgccaatcactctcaccgtctccaccagcagcctcaacctcatggccgcagactgcaaacagatcatcgccaaccaccacatgcaatctatctcatttgcatccggcggggatccggacacagccgagtatgtcgcctatgttgccaaagaccctgtgaatcagagagcctgccacattctggagtgtcccgaagggcttgcccaggatgtcatcagcaccattggccaggccttcgagttgcgcttcaaacaatacctcaggaacccacccaaactggtcacccctcatgacaggatggctggctttgatggctcagcatgggatgaggaggaggaagagccacctgaccatcagtactataatgacttcccggggaaggaaccccccttggggggggtggtagacatgaggcttcgggaaggagccgctccaggggctgctcgacccactgcacccaatgcccagacccccagccacttgggagctacattgcctgtaggacagcctgttgggggagatccagaagtccgcaaacagatgccacctccaccaccctgtccagcaggcagagagctttttgatgatccctcctatgtcaacgtccagaacctagacaaggcccggcaagcagtgggtggtgctgggccccccaatcctgctatcaatggcagtgcaccccgggacctgtttgacatgaagcccttcgaagatgctcttcgcgtgcctccacctccccagtcggtgtccatggctgagcagctccgaggggagccctggttccatgggaagctgagccggcgggaggctgaggcactgctgcagctcaatggggacttcctggtacgggagagcacgaccacacctggccagtatgtgctcactggcttgcagagtgggcagcctaagcatttgctactggtggaccctgagggtgtggttcggactaaggatcaccgctttgaaagtgtcagtcaccttatcagctaccacatggacaatcacttgcccatcatctctgcgggcagcgaactgtgtctacagcaacctgtggagcggaaactgtga

SEQ ID NO: 12 - protein, 474 aa, Homo sapiens
  Amino acid sequence of Shc1
MNKLSGGGGRRTRVEGGQLGGEEWTRHGSFVNKPTRGWLHPNDKVMGPGVSYLVRYMGCVEVLQSMRALDFNTRTQVTREAISLVCEAVPGAKGATRRRKPCSRPLSSILGRSNLKFAGMPITLTVSTSSLNLMAADCKQIIANHHMQSISFASGGDPDTAEYVAYVAKDPVNQRACHILECPEGLAQDVISTIGQAFELRFKQYLRNPPKLVTPHDRMAGFDGSAWDEEEEEPPDHQYYNDFPGKEPPLGGVVDMRLREGAAPGAARPTAPNAQTPSHLGATLPVGQPVGGDPEVRKQMPPPPPCPAGRELFDDPSYVNVQNLDKARQAVGGAGPPNPAINGSAPRDLFDMKPFEDALRVPPPPQSVSMAEQLRGEPWFHGKLSRREAEALLQLNGDFLVRESTTTPGQYVLTGLQSGQPKHLLLVDPEGVVRTKDHRFESVSHLISYHMDNHLPIISAGSELCLQQPVERKL

SEQ ID NO: 13 - DNA, 2832 bp, Homo sapiens
  Coding sequence for SHC2
atggccctgtgcagggtgcagggccagcgcccggtgtcctcggagggcctcagtttccccagcctcgcggccaggctccgggacgaggagggccggggtcccaggggcgcagccccccgcggctgcgcgctgggccgggcggatgacatcaccgggccggggggcgggagggagcgggcggagcgggagggcttcctccgcgccaggcgcagcgcccggtcgggctccccggcgggcccggggggcgtcccggcgctggcggccgccgtcctgggcgcctgcgagccccgctgcgccgcgccctgtcccctgcccgcgctcagccgctgtcggggcgcggggtcgcgggggtcgcggggcgggcggggggcggcggggtccggggacgccgccgccgccgccgagtggatccggaagggcagcttcatccacaaacccgcgcacggctggctacaccccgacgccagggtcctggggcccggggtctcctacgtcgtgcgggtgagtcccccccaccccccccgggagcccgttcgcggcggcctcccctcccccaccctctcctccgggacccccggaccccgcgagccaggcgcgctcggcctgcgcagtacaaccggcttctgcctccccaggacccgcttccgcctccccggaaccctcttccgcctccccaagacccgcttccgcctccccaggacccgcttccgcctccccggaacccgcctccgcctccccgggacccgcttccgcctccccggaacccacttccgcctccccaagacccgcttccgcctccccggaacccgcttccccctcccccggaacccacttccgcctccccaagaccggcttccgcctccccggaacccgcgtccgcctccctggaacccacttccccgtcccccggaacccgcttccgcctccccaggacccgcttccacctccccggaacccgaatccgcctccccaggacccgcttccgcctccccggaacctgcttccccgtcccccggaacatgcgtctgcctccccggaacccacttccgcctccccaagacccgcttctgcctccccaggacccgcttccgcctccccggaacccgattccgcctccccgggacccgcttccgcctccccggaacccgcttctgtctccccggaacccgcttccgcctccccaagacccgcttccgcctccccgggacccacttccgcctccccaagacccgcttccgcctccccggaacccacttccccctccgccggaacccgcgacccgcttccgcctccccgggacccacttccgcctcccccgggtctgtgcggatgccaggcctggttgggtctgttttccctggtggcatcgggccgccctcgccgtctcccggcggtttgtcctacaagtttaacgccgacggccggcgtgttccacggaggacgcaccctgaactgggcgctggagatagggaagtgctcaggatcgcaccatccccacgctcctcggcttcggtgctggtggaacagaaagagaccgacgagggcaagacgtacatgggctgcatcgaggttctccgctctatgcgctccctggactttaacacgcgcacgcaggtgaccagggaagccatcaaccggctccatgaggccgtgcctggcgtccggggatcctggaagaaaaaggcccccaacaaggccctggcgtccgtcctgggcaagagcaaccttcgctttgccggcatgagcatctccatccacatctccactgatggcctcagcctctccgtgcctgccacgcgccaggtcatcgccaaccaccacatgccgtccatctccttcgcgtcaggcggagacacggacatgacggattacgtggcctacgtcgccaaggaccccatcaaccagagagcctgccacatcctggagtgctgtgagggcctggcacagagcatcatcagcaccgtgggccaagctttcgagctgcgcttcaagcagtacctgcacagcccgcccaaggtggcgctgcccccagaaaggctggcagggccggaggagtcggcctggggggacgaggaggactctttggagcacaattactacaacagcatcccggggaaggagccgccgctgggcgggctagtggactccaggctggccctgacacagccctgcgccctcacggccctcgaccagggcccatctccttctctaagagatgcctgcagcctgccatgggacgtggggtccaccggtacagctccaccgggggacggctacgtgcaggcggacgcccggggccccccggaccacgaggagcacctgtatgtcaacacccagggtctggacgcccccgagccggaggacagccccaaaaaggatctgtttgacatgcgaccctttgaggatgccctgaagttgcatgagtgctcagtggcggcaggcgtgacagcagcccctcttcccttggaggaccagtggcccagcccccctacccgccgggcccctgtggcccccacggaggaacagctgcgtcaggagccctggtaccacggccggatgagccgccgggcggcagagaggatgcttcgagctgacggggacttccttgtgcgagacagcgtcaccaaccccgggcagtatgtcctcaccggcatgcacgccgggcagcccaagcacctgctgctcgtggaccccgagggcgtggtacggacgaaggacgtgctgtttgagagcatcagccacctgatcgaccaccacctgcagaacgggcagcccatcgtggccgccgagagtgagctgcacctgcgtggcgtggtctcacgggagccctga

SEQ ID NO: 14 - protein, 943 aa, Homo sapiens
  Amino acid sequence of Shc2
MALCRVQGQRPVSSEGLSFPSLAARLRDEEGRGPRGAAPRGCALGRADDITGPGGGRERAEREGFLRARRSARSGSPAGPGGVPALAAAVLGACEPRCAAPCPLPALSRCRGAGSRGSRGGRGAAGSGDAAAAAEWIRKGSFIHKPAHGWLHPDARVLGPGVSYVVRVSPPHPPREPVRGGLPSPTLSSGTPGPREPGALGLRSTTGFCLPRTRFRLPGTLFRLPKTRFRLPRTRFRLPGTRLRLPGTRFRLPGTHFRLPKTRFRLPGTRFPLPRNPLPPPQDRLPPPRNPRPPPWNPLPRPPEPASASPGPASTSPEPESASPGPASASPEPASPSPGTCVCLPGTHFRLPKTRFCLPRTRFRLPGTRFRLPGTRFRLPGTRFCLPGTRFRLPKTRFRLPGTHFRLPKTRFRLPGTHFPLRRNPRPASASPGPTSASPGSVRMPGLVGSVFPGGIGPPSPSPGGLSYKFNADGRRVPRRTHPELGAGDREVLRIAPSPRSSASVLVEQKETDEGKTYMGCIEVLRSMRSLDFNTRTQVTREAINRLHEAVPGVRGSWKKKAPNKALASVLGKSNLRFAGMSISIHISTDGLSLSVPATRQVIANHHMPSISFASGGDTDMTDYVAYVAKDPINQRACHILECCEGLAQSIISTVGQAFELRFKQYLHSPPKVALPPERLAGPEESAWGDEEDSLEHNYYNSIPGKEPPLGGLVDSRLALTQPCALTALDQGPSPSLRDACSLPWDVGSTGTAPPGDGYVQADARGPPDHEEHLYVNTQGLDAPEPEDSPKKDLFDMRPFEDALKLHECSVAAGVTAAPLPLEDQWPSPPTRRAPVAPTEEQLRQEPWYHGRMSRRAAERMLRADGDFLVRDSVTNPGQYVLTGMHAGQPKHLLLVDPEGVVRTKDVLFESISHLIDHHLQNGQPIVAAESELHLRGVVSREP

SEQ ID NO: 15 - DNA, 1785 bp, Homo sapiens
  Coding sequence for SHC3
atgcttccacgcaccaagtataaccgcttcaggaatgactcggtgacatcggtcgatgaccttctccacagcctgtcggtgagcggcggcggaggcaaggtttcggcggcgcgcgcgaccccggcggcggctccctacttggtgtccggcgaggcgctgcgcaaggcgcccgtcgatgggcccggcagcctgggccacctgctccacaaggtgtcccacctgaaactctccagctcgggcctccgcggcctgtcgtcggccgcccgggagcgggcgggcgcgcggctctcgggcagctgcagcgcgcccagcctggccgccccggacggcagtgcgccctcggcgccccgcgccccggccatgagcgccgccaggaagggccggcccggcgacgagccgctgcccaggccccctcggggggcgccgcacgccagcgaccaggtgctggggcccggagtcacctacgtggtcaagtacttggggtgcattgaagttctgcgctcaatgaggtctcttgacttcagtacaagaacacaaattaccagggaagccatcagccgcgtctgtgaagctgtgcctggtgcgaagggagccttcaagaagagaaagcctccaagcaaaatgctgtccagcatcttgggaaagagcaacctccagtttgcgggaatgagcatctctctgaccatctccacggccagtctgaacctgcgaactccggactccaaacagatcatagcgaatcaccacatgcggtccatctccttcgcctctgggggagacccggacacgactgactatgttgcatatgtgactaaggaccctgttaatcgcagagcttgtcacattttggaatgctgtgatgggctggcccaggatgtcatcggctccatcggacaagcctttgagctccggtttaagcaatatttacagtgtcctaccaagattcccgctctccatgatcgaatgcagagtctggatgagccatggacggaagaggagggagatggctcagaccacccatactacaacagcatcccaagcaagatgcctcctccagggggctttcttgatactagactgaaacccagaccccatgctcctgacacagcccagtttgcaggaaaagagcagacttattaccagggaagacacttaggagacacttttggcgaagactggcagcaaacacctttaaggcaagggtcctcggacatctacagcacgccagaagggaaactgcacgtggcccccacgggagaagcacccacctacgtcaacactcagcagatcccaccacaggcctggccggctgcggtcagcagtgctgagagcagcccaaggaaagacctctttgacatgaaaccttttgaagatgctctcaagaaccagcccttggggcccgtgttaagcaaggcagcctccgtggagtgcatcagccctgtgtcacctagagccccagatgccaagatgctggaggaactgcaagccgagacttggtaccaaggagagatgagcaggaaggaggcagaggggctgctggagaaagacggagacttcctggtcaggaagagcaccaccaacccgggctcctttgtcctcacgggcatgcacaatggccaggccaagcacctgctgctcgtggacccagaaggcacgatccagacaaaggacagagtctttgacagtatcagccacctcatcaaccaccacctagaaagcagcctgcccattgtctctgcagggagtgagctgtgtctccagcagccagtggagaggaagcagtga

SEQ ID NO: 16 - protein, 594 aa, Homo sapiens
  Amino acid sequence of Shc3
MLPRTKYNRFRNDSVTSVDDLLHSLSVSGGGGKVSAARATPAAAPYLVSGEALRKAPVDGPGSLGHLLHKVSHLKLSSSGLRGLSSAARERAGARLSGSCSAPSLAAPDGSAPSAPRAPAMSAARKGRPGDEPLPRPPRGAPHASDQVLGPGVTYVVKYLGCIEVLRSMRSLDFSTRTQITREAISRVCEAVPGAKGAFKKRKPPSKMLSSILGKSNLQFAGMSISLTISTASLNLRTPDSKQIIANHHMRSISFASGGDPDTTDYVAYVTKDPVNRRACHILECCDGLAQDVIGSIGQAFELRFKQYLQCPTKIPALHDRMQSLDEPWTEEEGDGSDHPYYNSIPSKMPPPGGFLDTRLKPRPHAPDTAQFAGKEQTYYQGRHLGDTFGEDWQQTPLRQGSSDIYSTPEGKLHVAPTGEAPTYVNTQQIPPQAWPAAVSSAESSPRKDLFDMKPFEDALKNQPLGPVLSKAASVECISPVSPRAPDAKMLEELQAETWYQGEMSRKEAEGLLEKDGDFLVRKSTTNPGSFVLTGMHNGQAKHLLLVDPEGTIQTKDRVFDSISHLINHHLESSLPIVSAGSELCLQQPVERKQ

SEQ ID NO: 17 - DNA, 2253 bp, Homo sapiens
  Coding sequence for STAT1
atgtctcagtggtacgaacttcagcagcttgactcaaaattcctggagcaggttcaccagctttatgatgacagttttcccatggaaatcagacagtacctggcacagtggttagaaaagcaagactgggagcacgctgccaatgatgtttcatttgccaccatccgttttcatgacctcctgtcacagctggatgatcaatatagtcgcttttctttggagaataacttcttgctacagcataacataaggaaaagcaagcgtaatcttcaggataattttcaggaagacccaatccagatgtctatgatcatttacagctgtctgaaggaagaaaggaaaattctggaaaacgcccagagatttaatcaggctcagtcggggaatattcagagcacagtgatgttagacaaacagaaagagcttgacagtaaagtcagaaatgtgaaggacaaggttatgtgtatagagcatgaaatcaagagcctggaagatttacaagatgaatatgacttcaaatgcaaaaccttgcagaacagagaacacgagaccaatggtgtggcaaagagtgatcagaaacaagaacagctgttactcaagaagatgtatttaatgcttgacaataagagaaaggaagtagttcacaaaataatagagttgctgaatgtcactgaacttacccagaatgccctgattaatgatgaactagtggagtggaagcggagacagcagagcgcctgtattggggggccgcccaatgcttgcttggatcagctgcagaactggttcactatagttgcggagagtctgcagcaagttcggcagcagcttaaaaagttggaggaattggaacagaaatacacctacgaacatgaccctatcacaaaaaacaaacaagtgttatgggaccgcaccttcagtcttttccagcagctcattcagagctcgtttgtggtggaaagacagccctgcatgccaacgcaccctcagaggccgctggtcttgaagacaggggtccagttcactgtgaagttgagactgttggtgaaattgcaagagctgaattataatttgaaagtcaaagtcttatttgataaagatgtgaatgagagaaatacagtaaaaggatttaggaagttcaacattttgggcacgcacacaaaagtgatgaacatggaggagtccaccaatggcagtctggcggctgaatttcggcacctgcaattgaaagaacagaaaaatgctggcaccagaacgaatgagggtcctctcatcgttactgaagagcttcactcccttagttttgaaacccaattgtgccagcctggtttggtaattgacctcgagacgacctctctgcccgttgtggtgatctccaacgtcagccagctcccgagcggttgggcctccatcctttggtacaacatgctggtggcggaacccaggaatctgtccttcttcctgactccaccatgtgcacgatgggctcagctttcagaagtgctgagttggcagttttcttctgtcaccaaaagaggtctcaatgtggaccagctgaacatgttgggagagaagcttcttggtcctaacgccagccccgatggtctcattccgtggacgaggttttgtaaggaaaatataaatgataaaaattttcccttctggctttggattgaaagcatcctagaactcattaaaaaacacctgctccctctctggaatgatgggtgcatcatgggcttcatcagcaaggagcgagagcgtgccctgttgaaggaccagcagccggggaccttcctgctgcggttcagtgagagctcccgggaaggggccatcacattcacatgggtggagcggtcccagaacggaggcgaacctgacttccatgcggttgaaccctacacgaagaaagaactttctgctgttactttccctgacatcattcgcaattacaaagtcatggctgctgagaatattcctgagaatcccctgaagtatctgtatccaaatattgacaaagaccatgcctttggaaagtattactccaggccaaaggaagcaccagagccaatggaacttgatggccctaaaggaactggatatatcaagactgagttgatttctgtgtctgaagttcacccttctagacttcagaccacagacaacctgctccccatgtctcctgaggagtttgacgaggtgtctcggatagtgggctctgtagaattcgacagtatgatgaacacagtatag

SEQ ID NO: 18 - protein, 750 aa, Homo sapiens
  Amino acid sequence of Stat1
MSQWYELQQLDSKFLEQVHQLYDDSFPMEIRQYLAQWLEKQDWEHAANDVSFATIRFHDLLSQLDDQYSRFSLENNFLLQHNIRKSKRNLQDNFQEDPIQMSMIIYSCLKEERKILENAQRFNQAQSGNIQSTVMLDKQKELDSKVRNVKDKVMCIEHEIKSLEDLQDEYDFKCKTLQNREHETNGVAKSDQKQEQLLLKKMYLMLDNKRKEVVHKIIELLNVTELTQNALINDELVEWKRRQQSACIGGPPNACLDQLQNWFTIVAESLQQVRQQLKKLEELEQKYTYEHDPITKNKQVLWDRTFSLFQQLIQSSFVVERQPCMPTHPQRPLVLKTGVQFTVKLRLLVKLQELNYNLKVKVLFDKDVNERNTVKGFRKFNILGTHTKVMNMEESTNGSLAAEFRHLQLKEQKNAGTRTNEGPLIVTEELHSLSFETQLCQPGLVIDLETTSLPVVVISNVSQLPSGWASILWYNMLVAEPRNLSFFLTPPCARWAQLSEVLSWQFSSVTKRGLNVDQLNMLGEKLLGPNASPDGLIPWTRFCKENINDKNFPFWLWIESILELIKKHLLPLWNDGCIMGFISKERERALLKDQQPGTFLLRFSESSREGAITFTWVERSQNGGEPDFHAVEPYTKKELSAVTFPDIIRNYKVMAAENIPENPLKYLYPNIDKDHAFGKYYSRPKEAPEPMELDGPKGTGYIKTELISVSEVHPSRLQTTDNLLPMSPEEFDEVSRIVGSVEFDSMMNTV

SEQ ID NO: 19 - DNA, 2556 bp, Homo sapiens
  Coding sequence for STAT2
atggcgcagtgggaaatgctgcagaatcttgacagcccctttcaggatcagctgcaccagctttactcgcacagcctcctgcctgtggacattcgacagtacttggctgtctggattgaagaccagaactggcaggaagctgcacttgggagtgatgattccaaggctaccatgctattcttccacttcttggatcagctgaactatgagtgtggccgttgcagccaggacccagagtccttgttgctgcagcacaatttgcggaaattctgccgggacattcagcccttttcccaggatcctacccagttggctgagatgatctttaacctccttctggaagaaaaaagaattttgatccaggctcagagggcccaattggaacaaggagagccagttctcgaaacacctgtggagagccagcaacatgagattgaatcccggatcctggatttaagggctatgatggagaagctggtaaaatccatcagccaactgaaagaccagcaggatgtcttctgcttccgatataagatccaggccaaagggaagacaccctctctggacccccatcagaccaaagagcagaagattctgcaggaaactctcaatgaactggacaaaaggagaaaggaggtgctggatgcctccaaagcactgctaggccgattaactaccctaatcgagctactgctgccaaagttggaggagtggaaggcccagcagcaaaaagcctgcatcagagctcccattgaccacgggttggaacagctggagacatggttcacagctggagcaaagctgttgtttcacctgaggcagctgctgaaggagctgaagggactgagttgcctggttagctatcaggatgaccctctgaccaaaggggtggacctacgcaacgcccaggtcacagagttgctacagcgtctgctccacagagcctttgtggtagaaacccagccctgcatgccccaaactccccatcgacccctcatcctcaagactggcagcaagttcaccgtccgaacaaggctgctggtgagactccaggaaggcaatgagtcactgactgtggaagtctccattgacaggaatcctcctcaattacaaggcttccggaagttcaacattctgacttcaaaccagaaaactttgacccccgagaaggggcagagtcagggtttgatttgggactttggttacctgactctggtggagcaacgttcaggtggttcaggaaagggcagcaataaggggccactaggtgtgacagaggaactgcacatcatcagcttcacggtcaaatatacctaccagggtctgaagcaggagctgaaaacggacaccctccctgtggtgattatttccaacatgaaccagctctcaattgcctgggcttcagttctctggttcaatttgctcagcccaaaccttcagaaccagcagttcttctccaacccccccaaggccccctggagcttgctgggccctgctctcagttggcagttctcctcctatgttggccgaggcctcaactcagaccagctgagcatgctgagaaacaagctgttcgggcagaactgtaggactgaggatccattattgtcctgggctgacttcactaagcgagagagccctcctggcaagttaccattctggacatggctggacaaaattctggagttggtacatgaccacctgaaggatctctggaatgatggacgcatcatgggctttgtgagtcggagccaggagcgccggctgctgaagaagaccatgtctggcacctttctactgcgcttcagtgaatcgtcagaagggggcattacctgctcctgggtggagcaccaggatgatgacaaggtgctcatctactctgtgcaaccgtacacgaaggaggtgctgcagtcactcccgctgactgaaatcatccgccattaccagttgctcactgaggagaatatacctgaaaacccactgcgcttcctctatccccgaatcccccgggatgaagcttttgggtgctactaccaggagaaagttaatctccaggaacggaggaaatacctgaaacacaggctcattgtggtctctaatagacaggtggatgaactgcaacaaccgctggagcttaagccagagccagagctggagtcattagagctggaactagggctggtgccagagccagagctcagcctggacttagagccactgctgaaggcagggctggatctggggccagagctagagtctgtgctggagtccactctggagcctgtgatagagcccacactatgcatggtatcacaaacagtgccagagccagaccaaggacctgtatcacagccagtgccagagccagatttgccctgtgatctgagacatttgaacactgagccaatggaaatcttcagaaactgtgtaaagattgaagaaatcatgccgaatggtgacccactgttggctggccagaacaccgtggatgaggtttacgtctcccgccccagccacttctacactgatggacccttgatgccttctgacttctag

SEQ ID NO: 20 - protein, 851 aa, Homo sapiens
  Amino acid sequence of Stat2
MAQWEMLQNLDSPFQDQLHQLYSHSLLPVDIRQYLAVWIEDQNWQEAALGSDDSKATMLFFHFLDQLNYECGRCSQDPESLLLQHNLRKFCRDIQPFSQDPTQLAEMIFNLLLEEKRILIQAQRAQLEQGEPVLETPVESQQHEIESRILDLRAMMEKLVKSISQLKDQQDVFCFRYKIQAKGKTPSLDPHQTKEQKILQETLNELDKRRKEVLDASKALLGRLTTLIELLLPKLEEWKAQQQKACIRAPIDHGLEQLETWFTAGAKLLFHLRQLLKELKGLSCLVSYQDDPLTKGVDLRNAQVTELLQRLLHRAFVVETQPCMPQTPHRPLILKTGSKFTVRTRLLVRLQEGNESLTVEVSIDRNPPQLQGFRKFNILTSNQKTLTPEKGQSQGLIWDFGYLTLVEQRSGGSGKGSNKGPLGVTEELHIISFTVKYTYQGLKQELKTDTLPVVIISNMNQLSIAWASVLWFNLLSPNLQNQQFFSNPPKAPWSLLGPALSWQFSSYVGRGLNSDQLSMLRNKLFGQNCRTEDPLLSWADFTKRESPPGKLPFWTWLDKILELVHDHLKDLWNDGRIMGFVSRSQERRLLKKTMSGTFLLRFSESSEGGITCSWVEHQDDDKVLIYSVQPYTKEVLQSLPLTEIIRHYQLLTEENIPENPLRFLYPRIPRDEAFGCYYQEKVNLQERRKYLKHRLIVVSNRQVDELQQPLELKPEPELESLELELGLVPEPELSLDLEPLLKAGLDLGPELESVLESTLEPVIEPTLCMVSQTVPEPDQGPVSQPVPEPDLPCDLRHLNTEPMEIFRNCVKIEEIMPNGDPLLAGQNTVDEVYVSRPSHFYTDGPLMPSDF

SEQ ID NO: 21 - DNA, 2313 bp, Homo sapiens
  Coding sequence for STAT3
atggcccaatggaatcagctacagcagcttgacacacggtacctggagcagctccatcagctctacagtgacagcttcccaatggagctgcggcagtttctggccccttggattgagagtcaagattgggcatatgcggccagcaaagaatcacatgccactttggtgtttcataatctcctgggagagattgaccagcagtatagccgcttcctgcaagagtcgaatgttctctatcagcacaatctacgaagaatcaagcagtttcttcagagcaggtatcttgagaagccaatggagattgcccggattgtggcccggtgcctgtgggaagaatcacgccttctacagactgcagccactgcggcccagcaagggggccaggccaaccaccccacagcagccgtggtgacggagaagcagcagatgctggagcagcaccttcaggatgtccggaagagagtgcaggatctagaacagaaaatgaaagtggtagagaatctccaggatgactttgatttcaactataaaaccctcaagagtcaaggagacatgcaagatctgaatggaaacaaccagtcagtgaccaggcagaagatgcagcagctggaacagatgctcactgcgctggaccagatgcggagaagcatcgtgagtgagctggcggggcttttgtcagcgatggagtacgtgcagaaaactctcacggacgaggagctggctgactggaagaggcggcaacagattgcctgcattggaggcccgcccaacatctgcctagatcggctagaaaactggataacgtcattagcagaatctcaacttcagacccgtcaacaaattaagaaactggaggagttgcagcaaaaagtttcctacaaaggggaccccattgtacagcaccggccgatgctggaggagagaatcgtggagctgtttagaaacttaatgaaaagtgcctttgtggtggagcggcagccctgcatgcccatgcatcctgaccggcccctcgtcatcaagaccggcgtccagttcactactaaagtcaggttgctggtcaaattccctgagttgaattatcagcttaaaattaaagtgtgcattgacaaagactctggggacgttgcagctctcagaggatcccggaaatttaacattctgggcacaaacacaaaagtgatgaacatggaagaatccaacaacggcagcctctctgcagaattcaaacacttgaccctgagggagcagagatgtgggaatgggggccgagccaattgtgatgcttccctgattgtgactgaggagctgcacctgatcacctttgagaccgaggtgtatcaccaaggcctcaagattgacctagagacccactccttgccagttgtggtgatctccaacatctgtcagatgccaaatgcctgggcgtccatcctgtggtacaacatgctgaccaacaatcccaagaatgtaaacttttttaccaagcccccaattggaacctgggatcaagtggccgaggtcctgagctggcagttctcctccaccaccaagcgaggactgagcatcgagcagctgactacactggcagagaaactcttgggacctggtgtgaattattcagggtgtcagatcacatgggctaaattttgcaaagaaaacatggctggcaagggcttctccttctgggtctggctggacaatatcattgaccttgtgaaaaagtacatcctggccctttggaacgaagggtacatcatgggctttatcagtaaggagcgggagcgggccatcttgagcactaagcctccaggcaccttcctgctaagattcagtgaaagcagcaaagaaggaggcgtcactttcacttgggtggagaaggacatcagcggtaagacccagatccagtccgtggaaccatacacaaagcagcagctgaacaacatgtcatttgctgaaatcatcatgggctataagatcatggatgctaccaatatcctggtgtctccactggtctatctctatcctgacattcccaaggaggaggcattcggaaagtattgtcggccagagagccaggagcatcctgaagctgacccaggtagcgctgccccatacctgaagaccaagtttatctgtgtgacaccaacgacctgcagcaataccattgacctgccgatgtccccccgcactttagattcattgatgcagtttggaaataatggtgaaggtgctgaaccctcagcaggagggcagtttgagtccctcacctttgacatggagttgacctcggagtgcgctacctcccccatgtga

SEQ ID NO: 22 - protein, 770 aa, Homo sapiens
  Amino acid sequence of Stat3
MAQWNQLQQLDTRYLEQLHQLYSDSFPMELRQFLAPWIESQDWAYAASKESHATLVFHNLLGEIDQQYSRFLQESNVLYQHNLRRIKQFLQSRYLEKPMEIARIVARCLWEESRLLQTAATAAQQGGQANHPTAAVVTEKQQMLEQHLQDVRKRVQDLEQKMKVVENLQDDFDFNYKTLKSQGDMQDLNGNNQSVTRQKMQQLEQMLTALDQMRRSIVSELAGLLSAMEYVQKTLTDEELADWKRRQQIACIGGPPNICLDRLENWITSLAESQLQTRQQIKKLEELQQKVSYKGDPIVQHRPMLEERIVELFRNLMKSAFVVERQPCMPMHPDRPLVIKTGVQFTTKVRLLVKFPELNYQLKIKVCIDKDSGDVAALRGSRKFNILGTNTKVMNMEESNNGSLSAEFKHLTLREQRCGNGGRANCDASLIVTEELHLITFETEVYHQGLKIDLETHSLPVVVISNICQMPNAWASILWYNMLTNNPKNVNFFTKPPIGTWDQVAEVLSWQFSSTTKRGLSIEQLTTLAEKLLGPGVNYSGCQITWAKFCKENMAGKGFSFWVWLDNIIDLVKKYILALWNEGYIMGFISKERERAILSTKPPGTFLLRFSESSKEGGVTFTWVEKDISGKTQIQSVEPYTKQQLNNMSFAEIIMGYKIMDATNILVSPLVYLYPDIPKEEAFGKYCRPESQEHPEADPGSAAPYLKTKFICVTPTTCSNTIDLPMSPRTLDSLMQFGNNGEGAEPSAGGQFESLTFDMELTSECATSPM

SEQ ID NO: 23 - DNA, 2247 bp, Homo sapiens
  Coding sequence for STAT4
atgtctcagtggaatcaagtccaacagttagaaatcaagtttttggagcaggtggatcaattctatgatgacaactttcccatggaaattcggcatctgttggcccaatggattgaaaatcaagactgggaggcagcttctaacaatgaaaccatggcaacgattcttcttcaaaacttgttaatacaactggatgaacagttaggtcgtgtttccaaagagaaaaacctactcttgatacacaatctaaaaagaattaggaaggtccttcagggaaaatttcatggaaatccaatgcatgtagctgtggttatttcaaactgtttaagggaagagaggagaatattggctgcagccaacatgcctgtccaggggcctctagagaaatccttacaaagttcttcagtttcagaaagacagaggaatgtggagcacaaagtggctgccattaaaaacagtgtgcagatgacagaacaagataccaaatacttagaagatctgcaagacgaatttgactacaggtataaaacaattcagacaatggatcagagtgacaagaatagtgccatggtgaatcaggaagttttgacactgcaggaaatgcttaacagcctcgatttcaagagaaaggaggctctcagtaaaatgacccaaatcatccatgagacagacctgttaatgaacaccatgctcatagaagagctgcaagactggaagcggcggcagcaaatcgcctgcatcgggggtccactccacaatgggctcgaccagcttcagaactgctttacactattggcagaaagtcttttccaactgagaaggcaattggagaaactagaggagcaatctaccaaaatgacatatgaaggtgatcccattccaatgcaaagaactcacatgctagaaagagtcaccttcttgatctacaaccttttcaagaactcatttgtggttgagcgacagccatgtatgccaacccaccctcagaggccgttggtacttaaaaccctaattcagttcactgtaaaactaaggctactaataaaattgccagaactaaactatcaggtaaaggttaaggcatcaattgacaagaatgtttcaactctaagcaaccgaagatttgtactttgtggaactaatgtcaaagccatgtctattgaagaatcttccaatgggagtctctcagtagaatttcgacatttgcaaccaaaggaaatgaagtccagtgctggaggtaaaggaaatgagggctgtcacatggtgactgaagaacttcattccataacgtttgaaacacagatctgcctctatggcctgaccatagatttggagaccagctcattgcctgtggtgatgatttccaatgtcagtcagttacctaatgcttgggcatccatcatttggtacaacgtgtcaaccaacgattcccagaacttggttttctttaataatcctccacctgccacattgagtcaactactggaggtgatgagctggcagttttcatcgtacgttggtcgtggtcttaactcagatcaactccatatgctggcagagaagcttacagtccaatctagctacagtgatggtcacctcacctgggccaagttctgcaaggaacatttacctggtaaatcatttaccttttggacatggcttgaagcaatattggatctaattaagaaacacattcttcccctttggattgatgggtatgtcatgggctttgttagcaaagagaaggaacggctgttgctaaaggataaaatgcctggcacctttttattaagattcagtgaaagccatctcggaggaataactttcacctgggtggaccattctgaaagtggggaagtgagattccactctgtagaaccctacaataaaggccggttgtctgctctgccattcgctgacatcctgcgagactacaaagttattatggctgaaaacattcctgaaaaccctctgaagtacctatatcctgacattcccaaagacaaagccttcggtaaacactacagctctcagccttgcgaagtttcaagaccaacagaaaggggtgacaaaggttatgttccttctgtttttatccccatctcaacaatccgaagtgattcaacagagccacattctccatcagaccttcttcccatgtctccaagtgtgtatgcggtgttgagagaaaacctgagtcccacaacaattgaaactgcaatgaagtctccttattctgctgaatga

SEQ ID NO: 24 - protein, 748 aa, Homo sapiens
  Amino acid sequence of Stat4
MSQWNQVQQLEIKFLEQVDQFYDDNFPMEIRHLLAQWIENQDWEAASNNETMATILLQNLLIQLDEQLGRVSKEKNLLLIHNLKRIRKVLQGKFHGNPMHVAVVISNCLREERRILAAANMPVQGPLEKSLQSSSVSERQRNVEHKVAAIKNSVQMTEQDTKYLEDLQDEFDYRYKTIQTMDQSDKNSAMVNQEVLTLQEMLNSLDFKRKEALSKMTQIIHETDLLMNTMLIEELQDWKRRQQIACIGGPLHNGLDQLQNCFTLLAESLFQLRRQLEKLEEQSTKMTYEGDPIPMQRTHMLERVTFLIYNLFKNSFVVERQPCMPTHPQRPLVLKTLIQFTVKLRLLIKLPELNYQVKVKASIDKNVSTLSNRRFVLCGTNVKAMSIEESSNGSLSVEFRHLQPKEMKSSAGGKGNEGCHMVTEELHSITFETQICLYGLTIDLETSSLPVVMISNVSQLPNAWASIIWYNVSTNDSQNLVFFNNPPPATLSQLLEVMSWQFSSYVGRGLNSDQLHMLAEKLTVQSSYSDGHLTWAKFCKEHLPGKSFTFWTWLEAILDLIKKHILPLWIDGYVMGFVSKEKERLLLKDKMPGTFLLRFSESHLGGITFTWVDHSESGEVRFHSVEPYNKGRLSALPFADILRDYKVIMAENIPENPLKYLYPDIPKDKAFGKHYSSQPCEVSRPTERGDKGYVPSVFIPISTIRSDSTEPHSPSDLLPMSPSVYAVLRENLSPTTIETAMKSPYSAE

SEQ ID NO: 25 - DNA, 2385 bp, Homo sapiens
  Coding sequence for STAT5A
atggcgggctggatccaggcccagcagctgcagggagacgcgctgcgccagatgcaggtgctgtacggccagcacttccccatcgaggtccggcactacttggcccagtggattgagagccagccatgggatgccattgacttggacaatccccaggacagagcccaagccacccagctcctggagggcctggtgcaggagctgcagaagaaggcggagcaccaggtgggggaagatgggtttttactgaagatcaagctggggcactacgccacgcagctccagaaaacatatgaccgctgccccctggagctggtccgctgcatccggcacattctgtacaatgaacagaggctggtccgagaagccaacaattgcagctctccggctgggatcctggttgacgccatgtcccagaagcaccttcagatcaaccagacatttgaggagctgcgactggtcacgcaggacacagagaatgagctgaagaaactgcagcagactcaggagtacttcatcatccagtaccaggagagcctgaggatccaagctcagtttgcccagctggcccagctgagcccccaggagcgtctgagccgggagacggccctccagcagaagcaggtgtctctggaggcctggttgcagcgtgaggcacagacactgcagcagtaccgcgtggagctggccgagaagcaccagaagaccctgcagctgctgcggaagcagcagaccatcatcctggatgacgagctgatccagtggaagcggcggcagcagctggccgggaacggcgggccccccgagggcagcctggacgtgctacagtcctggtgtgagaagttggccgagatcatctggcagaaccggcagcagatccgcagggctgagcacctctgccagcagctgcccatccccggcccagtggaggagatgctggccgaggtcaacgccaccatcacggacattatctcagccctggtgaccagcacattcatcattgagaagcagcctcctcaggtcctgaagacccagaccaagtttgcagccaccgtacgcctgctggtgggcgggaagctgaacgtgcacatgaatcccccccaggtgaaggccaccatcatcagtgagcagcaggccaagtctctgcttaaaaatgagaacacccgcaacgagtgcagtggtgagatcctgaacaactgctgcgtgatggagtaccaccaagccacgggcaccctcagtgcccacttcaggaacatgtcactgaagaggatcaagcgtgctgaccggcggggtgcagagtccgtgacagaggagaagttcacagtcctgtttgagtctcagttcagtgttggcagcaatgagcttgtgttccaggtgaagactctgtccctacctgtggttgtcatcgtccacggcagccaggaccacaatgccacggctactgtgctgtgggacaatgcctttgctgagccgggcagggtgccatttgccgtgcctgacaaagtgctgtggccgcagctgtgtgaggcgctcaacatgaaattcaaggccgaagtgcagagcaaccggggcctgaccaaggagaacctcgtgttcctggcgcagaaactgttcaacaacagcagcagccacctggaggactacagtggcctgtccgtgtcctggtcccagttcaacagggagaacttgccgggctggaactacaccttctggcagtggtttgacggggtgatggaggtgttgaagaagcaccacaagccccactggaatgatggggccatcctaggttttgtgaataagcaacaggcccacgacctgctcatcaacaagcccgacgggaccttcttgttgcgctttagtgactcagaaatcgggggcatcaccatcgcctggaagtttgactccccggaacgcaacctgtggaacctgaaaccattcaccacgcgggatttctccatcaggtccctggctgaccggctgggggacctgagctatctcatctatgtgtttcctgaccgccccaaggatgaggtcttctccaagtactacactcctgtgctggctaaagctgttgatggatatgtgaaaccacagatcaagcaagtggtccctgagtttgtgaatgcatctgcagatgctgggggcagcagcgccacgtacatggaccaggccccctccccagctgtgtgcccccaggctccctataacatgtacccacagaaccctgaccatgtactcgatcaggatggagaattcgacctggatgagaccatggatgtggccaggcacgtggaggaactcttacgccgaccaatggacagtcttgactcccgcctctcgccccctgccggtcttttcacctctgccagaggctccctctcatga

SEQ ID NO: 26 - protein, 794 aa, Homo sapiens
  Amino acid sequence of Stat5A
MAGWIQAQQLQGDALRQMQVLYGQHFPIEVRHYLAQWIESQPWDAIDLDNPQDRAQATQLLEGLVQELQKKAEHQVGEDGFLLKIKLGHYATQLQKTYDRCPLELVRCIRHILYNEQRLVREANNCSSPAGILVDAMSQKHLQINQTFEELRLVTQDTENELKKLQQTQEYFIIQYQESLRIQAQFAQLAQLSPQERLSRETALQQKQVSLEAWLQREAQTLQQYRVELAEKHQKTLQLLRKQQTIILDDELIQWKRRQQLAGNGGPPEGSLDVLQSWCEKLAEIIWQNRQQIRRAEHLCQQLPIPGPVEEMLAEVNATITDIISALVTSTFIIEKQPPQVLKTQTKFAATVRLLVGGKLNVHMNPPQVKATIISEQQAKSLLKNENTRNECSGEILNNCCVMEYHQATGTLSAHFRNMSLKRIKRADRRGAESVTEEKFTVLFESQFSVGSNELVFQVKTLSLPVVVIVHGSQDHNATATVLWDNAFAEPGRVPFAVPDKVLWPQLCEALNMKFKAEVQSNRGLTKENLVFLAQKLFNNSSSHLEDYSGLSVSWSQFNRENLPGWNYTFWQWFDGVMEVLKKHHKPHWNDGAILGFVNKQQAHDLLINKPDGTFLLRFSDSEIGGITIAWKFDSPERNLWNLKPFTTRDFSIRSLADRLGDLSYLIYVFPDRPKDEVFSKYYTPVLAKAVDGYVKPQIKQVVPEFVNASADAGGSSATYMDQAPSPAVCPQAPYNMYPQNPDHVLDQDGEFDLDETMDVARHVEELLRRPMDSLDSRLSPPAGLFTSARGSLS

SEQ ID NO: 27 - DNA, 2364 bp, Homo sapiens
  Coding sequence for STAT5B
atggctgtgtggatacaagctcagcagctccaaggagaagcccttcatcagatgcaagcgttatatggccagcattttcccattgaggtgcggcattatttatcccagtggattgaaagccaagcatgggactcagtagatcttgataatccacaggagaacattaaggccacccagctcctggagggcctggtgcaggagctgcagaagaaggcagagcaccaggtgggggaagatgggtttttactgaagatcaagctggggcactatgccacacagctccagaacacgtatgaccgctgccccatggagctggtccgctgcatccgccatatattgtacaatgaacagaggttggtccgagaagccaacaatggtagctctccagctggaagccttgctgatgccatgtcccagaaacacctccagatcaaccagacgtttgaggagctgcgactggtcacgcaggacacagagaatgagttaaaaaagctgcagcagactcaggagtacttcatcatccagtaccaggagagcctgaggatccaagctcagtttggcccgctggcccagctgagcccccaggagcgtctgagccgggagacggccctccagcagaagcaggtgtctctggaggcctggttgcagcgtgaggcacagacactgcagcagtaccgcgtggagctggccgagaagcaccagaagaccctgcagctgctgcggaagcagcagaccatcatcctggatgacgagctgatccagtggaagcggcggcagcagctggccgggaacggcgggccccccgagggcagcctggacgtgctacagtcctggtgtgagaagttggccgagatcatctggcagaaccggcagcagatccgcagggctgagcacctctgccagcagctgcccatccccggcccagtggaggagatgctggccgaggtcaacgccaccatcacggacattatctcagccctggtgaccagcacgttcatcattgagaagcagcctcctcaggtcctgaagacccagaccaagtttgcagccactgtgcgcctgctggtgggcgggaagctgaacgtgcacatgaaccccccccaggtgaaggccaccatcatcagtgagcagcaggccaagtctctgctcaagaacgagaacacccgcaatgattacagtggcgagatcttgaacaactgctgcgtcatggagtaccaccaagccacaggcacccttagtgcccacttcaggaatatgtccctgaaacgaattaagaggtcagaccgtcgtggggcagagtcggtgacagaagaaaaatttacaatcctgtttgaatcccagttcagtgttggtggaaatgagctggtttttcaagtcaagaccctgtccctgccagtggtggtgatcgttcatggcagccaggacaacaatgcgacggccactgttctctgggacaatgcttttgcagagcctggcagggtgccatttgccgtgcctgacaaagtgctgtggccacagctgtgtgaggcgctcaacatgaaattcaaggccgaagtgcagagcaaccggggcctgaccaaggagaacctcgtgttcctggcgcagaaactgttcaacaacagcagcagccacctggaggactacagtggcctgtctgtgtcctggtcccagttcaacagggagaatttaccaggacggaattacactttctggcaatggtttgacggtgtgatggaagtgttaaaaaaacatctcaagcctcattggaatgatggggccattttggggtttgtaaacaagcaacaggcccatgacctactcattaacaagccagatgggaccttcctcctgagattcagtgactcagaaattggcggcatcaccattgcttggaagtttgattctcaggaaagaatgttttggaatctgatgccttttaccaccagagacttctccattcggtccctagccgaccgcttgggagacttgaattaccttatctacgtgtttcctgatcggccaaaagatgaagtatactccaaatactacacaccagttccctgcgagtctgctactgctaaagctgttgatggatacgtgaagccacagatcaagcaagtggtccctgagtttgtgaacgcatctgcagatgccgggggcggcagcgccacgtacatggaccaggccccctccccagctgtgtgtccccaggctcactataacatgtacccacagaaccctgactcagtccttgacaccgatggggacttcgatctggaggacacaatggacgtagcgcggcgtgtggaggagctcctgggccggccaatggacagtcagtggatcccgcacgcacaatcgtga

SEQ ID NO: 28 - protein, 787 aa, Homo sapiens
  Amino acid sequence of Stat5B
MAVWIQAQQLQGEALHQMQALYGQHFPIEVRHYLSQWIESQAWDSVDLDNPQENIKATQLLEGLVQELQKKAEHQVGEDGFLLKIKLGHYATQLQNTYDRCPMELVRCIRHILYNEQRLVREANNGSSPAGSLADAMSQKHLQINQTFEELRLVTQDTENELKKLQQTQEYFIIQYQESLRIQAQFGPLAQLSPQERLSRETALQQKQVSLEAWLQREAQTLQQYRVELAEKHQKTLQLLRKQQTIILDDELIQWKRRQQLAGNGGPPEGSLDVLQSWCEKLAEIIWQNRQQIRRAEHLCQQLPIPGPVEEMLAEVNATITDIISALVTSTFIIEKQPPQVLKTQTKFAATVRLLVGGKLNVHMNPPQVKATIISEQQAKSLLKNENTRNDYSGEILNNCCVMEYHQATGTLSAHFRNMSLKRIKRSDRRGAESVTEEKFTILFESQFSVGGNELVFQVKTLSLPVVVIVHGSQDNNATATVLWDNAFAEPGRVPFAVPDKVLWPQLCEALNMKFKAEVQSNRGLTKENLVFLAQKLFNNSSSHLEDYSGLSVSWSQFNRENLPGRNYTFWQWFDGVMEVLKKHLKPHWNDGAILGFVNKQQAHDLLINKPDGTFLLRFSDSEIGGITIAWKFDSQERMFWNLMPFTTRDFSIRSLADRLGDLNYLIYVFPDRPKDEVYSKYYTPVPCESATAKAVDGYVKPQIKQVVPEFVNASADAGGGSATYMDQAPSPAVCPQAHYNMYPQNPDSVLDTDGDFDLEDTMDVARRVEELLGRPMDSQWIPHAQS

SEQ ID NO: 29 - DNA, 2544 bp, Homo sapiens
  Coding sequence for STAT6
atgtctctgtggggtctggtctccaagatgcccccagaaaaagtgcagcggctctatgtcgactttccccaacacctgcggcatcttctgggtgactggctggagagccagccctgggagttcctggtcggctccgacgccttctgctgcaacttggctagtgccctactttcagacactgtccagcaccttcaggcctcggtgggagagcagggggaggggagcaccatcttgcaacacatcagcacccttgagagcatatatcagagggaccccctgaagctggtggccactttcagacaaatacttcaaggagagaaaaaagctgttatggaacagttccgccacttgccaatgcctttccactggaagcaggaagaactcaagtttaagacaggcttgcggaggctgcagcaccgagtaggggagatccaccttctccgagaagccctgcagaagggggctgaggctggccaagtgtctctgcacagcttgatagaaactcctgctaatgggactgggccaagtgaggccctggccatgctactgcaggagaccactggagagctagaggcagccaaagccctagtgctgaagaggatccagatttggaaacggcagcagcagctggcagggaatggcgcaccgtttgaggagagcctggccccactccaggagaggtgtgaaagcctggtggacatttattcccagctacagcaggaggtaggggcggctggtggggagcttgagcccaagacccgggcatcgctgactggccggctggatgaagtcctgagaaccctcgtcaccagttgcttcctggtggagaagcagcccccccaggtactgaagactcagaccaagttccaggctggagttcgattcctgttgggcttgaggttcctgggggccccagccaagcctccgctggtcagggccgacatggtgacagagaagcaggcgcgggagctgagtgtgcctcagggtcctggggctggagcagaaagcactggagaaatcatcaacaacactgtgcccttggagaacagcattcctgggaactgctgctctgccctgttcaagaacctgcttctcaagaagatcaagcggtgtgagcggaagggcactgagtctgtcacagaggagaagtgcgctgtgctcttctctgccagcttcacacttggccccggcaaactccccatccagctccaggccctgtctctgcccctggtggtcatcgtccatggcaaccaagacaacaatgccaaagccactatcctgtgggacaatgccttctctgagatggaccgcgtgccctttgtggtggctgagcgggtgccctgggagaagatgtgtgaaactctgaacctgaagttcatggctgaggtggggaccaaccgggggctgctcccagagcacttcctcttcctggcccagaagatcttcaatgacaacagcctcagtatggaggccttccagcaccgttctgtgtcctggtcgcagttcaacaaggagatcctgctgggccgtggcttcaccttttggcagtggtttgatggtgtcctggacctcaccaaacgctgtctccggagctactggtctgaccggctgatcattggcttcatcagcaaacagtacgttactagccttcttctcaatgagcccgacggaacctttctcctccgcttcagcgactcagagattgggggcatcaccattgcccatgtcatccggggccaggatggctctccacagatagagaacatccagccattctctgccaaagacctgtccattcgctcactgggggaccgaatccgggatcttgctcagctcaaaaatctctatcccaagaagcccaaggatgaggctttccggagccactacaagcctgaacagatgggtaaggatggcaggggttatgtcccagctaccatcaagatgaccgtggaaagggaccaaccacttcctaccccagagctccagatgcctaccatggtgccttcttatgaccttggaatggcccctgattcctccatgagcatgcagcttggcccagatatggtgccccaggtgtacccaccacactctcactccatccccccgtatcaaggcctctccccagaagaatcagtcaacgtgttgtcagccttccaggagcctcacctgcagatgccccccagcctgggccagatgagcctgccctttgaccagcctcacccccagggcctgctgccgtgccagcctcaggagcatgctgtgtccagccctgaccccctgctctgctcagatgtgaccatggtggaagacagctgcctgagccagccagtgacagcgtttcctcagggcacttggattggtgaagacatattccctcctctgctgcctcccactgaacaggacctcactaagcttctcctggaggggcaaggggagtcggggggagggtccttgggggcacagcccctcctgcagccctcccactatgggcaatctgggatctcaatgtcccacatggacctaagggccaaccccagttggtga

SEQ ID NO: 30 - protein, 847 aa, Homo sapiens
  Amino acid sequence of Stat6
MSLWGLVSKMPPEKVQRLYVDFPQHLRHLLGDWLESQPWEFLVGSDAFCCNLASALLSDTVQHLQASVGEQGEGSTILQHISTLESIYQRDPLKLVATFRQILQGEKKAVMEQFRHLPMPFHWKQEELKFKTGLRRLQHRVGEIHLLREALQKGAEAGQVSLHSLIETPANGTGPSEALAMLLQETTGELEAAKALVLKRIQIWKRQQQLAGNGAPFEESLAPLQERCESLVDIYSQLQQEVGAAGGELEPKTRASLTGRLDEVLRTLVTSCFLVEKQPPQVLKTQTKFQAGVRFLLGLRFLGAPAKPPLVRADMVTEKQARELSVPQGPGAGAESTGEIINNTVPLENSIPGNCCSALFKNLLLKKIKRCERKGTESVTEEKCAVLFSASFTLGPGKLPIQLQALSLPLVVIVHGNQDNNAKATILWDNAFSEMDRVPFVVAERVPWEKMCETLNLKFMAEVGTNRGLLPEHFLFLAQKIFNDNSLSMEAFQHRSVSWSQFNKEILLGRGFTFWQWFDGVLDLTKRCLRSYWSDRLIIGFISKQYVTSLLLNEPDGTFLLRFSDSEIGGITIAHVIRGQDGSPQIENIQPFSAKDLSIRSLGDRIRDLAQLKNLYPKKPKDEAFRSHYKPEQMGKDGRGYVPATIKMTVERDQPLPTPELQMPTMVPSYDLGMAPDSSMSMQLGPDMVPQVYPPHSHSIPPYQGLSPEESVNVLSAFQEPHLQMPPSLGQMSLPFDQPHPQGLLPCQPQEHAVSSPDPLLCSDVTMVEDSCLSQPVTAFPQGTWIGEDIFPPLLPPTEQDLTKLLLEGQGESGGGSLGAQPLLQPSHYGQSGISMSHMDLRANPSW

SEQ ID NO: 31 - DNA, 738 bp, Homo sapiens
  Coding sequence for YWHAZ
atggataaaaatgagctggttcagaaggccaaactggccgagcaggctgagcgatatgatgacatggcagcctgcatgaagtctgtaactgagcaaggagctgaattatccaatgaggagaggaatcttctctcagttgcttataaaaatgttgtaggagcccgtaggtcatcttggagggtcgtctcaagtattgaacaaaagacggaaggtgctgagaaaaaacagcagatggctcgagaatacagagagaaaattgagacggagctaagagatatctgcaatgatgtactgtctcttttggaaaagttcttgatccccaatgcttcacaagcagagagcaaagtcttctatttgaaaatgaaaggagattactaccgttacttggctgaggttgccgctggtgatgacaagaaagggattgtcgatcagtcacaacaagcataccaagaagcttttgaaatcagcaaaaaggaaatgcaaccaacacatcctatcagactgggtctggcccttaacttctctgtgttctattatgagattctgaactccccagagaaagcctgctctcttgcaaagacagcttttgatgaagccattgctgaacttgatacattaagtgaagagtcatacaaagacagcacgctaataatgcaattactgagagacaacttgacattgtggacatcggatacccaaggagacgaagctgaagcaggagaaggaggggaaaattaa

SEQ ID NO: 32 - protein, 245 aa, Homo sapiens
  Amino acid sequence of 14-3-3zeta
MDKNELVQKAKLAEQAERYDDMAACMKSVTEQGAELSNEERNLLSVAYKNVVGARRSSWRVVSSIEQKTEGAEKKQQMAREYREKIETELRDICNDVLSLLEKFLIPNASQAESKVFYLKMKGDYYRYLAEVAAGDDKKGIVDQSQQAYQEAFEISKKEMQPTHPIRLGLALNFSVFYYEILNSPEKACSLAKTAFDEAIAELDTLSEESYKDSTLIMQLLRDNLTLWTSDTQGDEAEAGEGGEN

SEQ ID NO: 33 - DNA, 2175 bp, Homo sapiens
  Coding sequence for PIK3R1
atgagtgctgaggggtaccagtacagagcgctgtatgattataaaaaggaaagagaagaagatattgacttgcacttgggtgacatattgactgtgaataaagggtccttagtagctcttggattcagtgatggacaggaagccaggcctgaagaaattggctggttaaatggctataatgaaaccacaggggaaaggggggactttccgggaacttacgtagaatatattggaaggaaaaaaatctcgcctcccacaccaaagccccggccacctcggcctcttcctgttgcaccaggttcttcgaaaactgaagcagatgttgaacaacaagctttgactctcccggatcttgcagagcagtttgcccctcctgacattgccccgcctcttcttatcaagctcgtggaagccattgaaaagaaaggtctggaatgttcaactctatacagaacacagagctccagcaacctggcagaattacgacagcttcttgattgtgatacaccctccgtggacttggaaatgatcgatgtgcacgttttggctgacgctttcaaacgctatctcctggacttaccaaatcctgtcattccagcagccgtttacagtgaaatgatttctttagctccagaagtacaaagctccgaagaatatattcagctattgaagaagcttattaggtcgcctagcatacctcatcagtattggcttacgcttcagtatttgttaaaacatttcttcaagctctctcaaacctccagcaaaaatctgttgaatgcaagagtactctctgaaattttcagccctatgcttttcagattctcagcagccagctctgataatactgaaaacctcataaaagttatagaaattttaatctcaactgaatggaatgaacgacagcctgcaccagcactgcctcctaaaccaccaaaacctactactgtagccaacaacggtatgaataacaatatgtccttacaagatgctgaatggtactggggagatatctcgagggaagaagtgaatgaaaaacttcgagatacagcagacgggacctttttggtacgagatgcgtctactaaaatgcatggtgattatactcttacactaaggaaagggggaaataacaaattaatcaaaatatttcatcgagatgggaaatatggcttctctgacccattaaccttcagttctgtggttgaattaataaaccactaccggaatgaatctctagctcagtataatcccaaattggatgtgaaattactttatccagtatccaaataccaacaggatcaagttgtcaaagaagataatattgaagctgtagggaaaaaattacatgaatataacactcagtttcaagaaaaaagtcgagaatatgatagattatatgaagaatatacccgcacatcccaggaaatccaaatgaaaaggacagctattgaagcatttaatgaaaccataaaaatatttgaagaacagtgccagacccaagagcggtacagcaaagaatacatagaaaagtttaaacgtgaaggcaatgagaaagaaatacaaaggattatgcataattatgataagttgaagtctcgaatcagtgaaattattgacagtagaagaagattggaagaagacttgaagaagcaggcagctgagtatcgagaaattgacaaacgtatgaacagcattaaaccagaccttatccagctgagaaagacgagagaccaatacttgatgtggttgactcaaaaaggtgttcggcaaaagaagttgaacgagtggttgggcaatgaaaacactgaagaccaatattcactggtggaagatgatgaagatttgccccatcatgatgagaagacatggaatgttggaagcagcaaccgaaacaaagctgaaaacctgttgcgagggaagcgagatggcacttttcttgtccgggagagcagtaaacagggctgctatgcctgctctgtagtggtggacggcgaagtaaagcattgtgtcataaacaaaacagcaactggctatggctttgccgagccctataacttgtacagctctctgaaagaactggtgctacattaccaacacacctcccttgtgcagcacaacgactccctcaatgtcacactagcctacccagtatatgcacagcagaggcgatga

SEQ ID NO: 34 - protein, 724 aa, Homo sapiens
  Amino acid sequence of p85alpha
MSAEGYQYRALYDYKKEREEDIDLHLGDILTVNKGSLVALGFSDGQEARPEEIGWLNGYNETTGERGDFPGTYVEYIGRKKISPPTPKPRPPRPLPVAPGSSKTEADVEQQALTLPDLAEQFAPPDIAPPLLIKLVEAIEKKGLECSTLYRTQSSSNLAELRQLLDCDTPSVDLEMIDVHVLADAFKRYLLDLPNPVIPAAVYSEMISLAPEVQSSEEYIQLLKKLIRSPSIPHQYWLTLQYLLKHFFKLSQTSSKNLLNARVLSEIFSPMLFRFSAASSDNTENLIKVIEILISTEWNERQPAPALPPKPPKPTTVANNGMNNNMSLQDAEWYWGDISREEVNEKLRDTADGTFLVRDASTKMHGDYTLTLRKGGNNKLIKIFHRDGKYGFSDPLTFSSVVELINHYRNESLAQYNPKLDVKLLYPVSKYQQDQVVKEDNIEAVGKKLHEYNTQFQEKSREYDRLYEEYTRTSQEIQMKRTAIEAFNETIKIFEEQCQTQERYSKEYIEKFKREGNEKEIQRIMHNYDKLKSRISEIIDSRRRLEEDLKKQAAEYREIDKRMNSIKPDLIQLRKTRDQYLMWLTQKGVRQKKLNEWLGNENTEDQYSLVEDDEDLPHHDEKTWNVGSSNRNKAENLLRGKRDGTFLVRESSKQGCYACSVVVDGEVKHCVINKTATGYGFAEPYNLYSSLKELVLHYQHTSLVQHNDSLNVTLAYPVYAQQRR

SEQ ID NO: 35 - DNA, 2187 bp, Homo sapiens
  Coding sequence for PIK3R2
atggcgggccctgagggcttccagtaccgcgctctgtacccgttccgccgggagcggccggaggacctggagctgctgcccggcgacgtgctggtagtgagccgggcggccttgcaggcgctgggcgtggccgagggtggcgagcgctgcccacagagcgtgggctggatgcccggcctcaacgagcgcacacggcagcgaggtgacttccctggcacctatgtggagttcctggggcccgtggccctggcccggcccggccctcgcccacggggcccccgcccactgcccgccaggccccgtgatggggcccctgagccaggcctcacactccccgacttgcccgagcagttctccccacctgatgtggctccccctcttctggtgaagcttgtggaggccattgaaaggacagggctggacagcgaatctcactaccgcccggagctgcccgcaccgcgtacagactggtccctgagcgacgtggatcagtgggacacggcagccctggctgacggcattaagagcttcctgctggcactgcccgcgccgctcgtgacccccgaggcctcggccgaggcgcgccgggccctgcgggaggccgcggggcccgtggggccggcgctggagccaccgacgctgccgctgcaccgcgcgctcacgctgcgcttcctgctccagcacctgggccgcgtggcccgccgcgccccggccctgggtcccgcggtccgggccctgggcgccacctttgggccgctgctgctgcgcgcgccgccgccgccgtcctcgccgccgccagggggcgctcccgacgggagtgagcccagccctgacttcccggcgctgctggtggagaagctgcttcaggaacacttggaagagcaggaggttgcgcccccagcgctgccgcctaaaccccccaaggcaaagccggcccccacagtcctggccaatggagggagcccaccctccctgcaggatgctgagtggtactggggggacatttcaagggaggaggtgaacgagaaactccgggacactcccgatggcaccttcctagtccgagatgcttctagcaagatccagggcgagtacacgctgaccctcaggaaaggcgggaacaataagctgatcaaggtcttccaccgagatgggcactatggcttctcagagccactcaccttctgctccgttgtggacctcatcaatcactaccgccacgagtctctggcccagtacaatgccaagctggacacacggctcctctaccctgtgtccaaataccagcaggaccagattgtcaaggaggacagcgtggaggcagtgggcgcccagcttaaggtctatcaccagcagtaccaggacaagagccgcgagtatgaccagctttatgaagagtacacacggacctcccaggagctgcagatgaagcgtactgcaattgaggccttcaatgagactatcaagatctttgaagagcagggccagactcaagagaaatgcagcaaggaatacctggagcgcttccggcgtgagggcaacgagaaagagatgcaaaggatcctgctgaactccgagcggctcaagtcccgcattgccgagatccatgagagccgcacgaagctggagcagcagctgcgggcccaggcctcggacaacagagagatcgacaagcgcatgaacagcctcaagccggacctcatgcagctgcgcaagatccgagaccagtacctcgtgtggctcacccagaaaggcgcccggcagaagaaaatcaacgagtggctggggattaaaaatgagactgaggaccagtacgcactcatggaggacgaggacgatctcccgcaccacgaggaacgcacttggtacgtgggcaagatcaaccgcacgcaggcagaggagatgctgagtggcaagcgggatggcaccttcctcatccgcgagagcagccagcggggctgctacgcctgctccgtggtagtggacggcgacaccaagcactgcgtcatctaccgcacggccaccggcttcggcttcgcggagccctacaacctgtacgggtcgctgaaggagctggtgctgcactaccagcacgcctcgctggtgcagcacaacgacgcgctcaccgtcaccctggcgcacccagtgcgcgccccgggccccggcccgccgcctgccgcccgctga

SEQ ID NO: 36 - protein, 728 aa, Homo sapiens
  Amino acid sequence of p85beta
MAGPEGFQYRALYPFRRERPEDLELLPGDVLVVSRAALQALGVAEGGERCPQSVGWMPGLNERTRQRGDFPGTYVEFLGPVALARPGPRPRGPRPLPARPRDGAPEPGLTLPDLPEQFSPPDVAPPLLVKLVEAIERTGLDSESHYRPELPAPRTDWSLSDVDQWDTAALADGIKSFLLALPAPLVTPEASAEARRALREAAGPVGPALEPPTLPLHRALTLRFLLQHLGRVARRAPALGPAVRALGATFGPLLLRAPPPPSSPPPGGAPDGSEPSPDFPALLVEKLLQEHLEEQEVAPPALPPKPPKAKPAPTVLANGGSPPSLQDAEWYWGDISREEVNEKLRDTPDGTFLVRDASSKIQGEYTLTLRKGGNNKLIKVFHRDGHYGFSEPLTFCSVVDLINHYRHESLAQYNAKLDTRLLYPVSKYQQDQIVKEDSVEAVGAQLKVYHQQYQDKSREYDQLYEEYTRTSQELQMKRTAIEAFNETIKIFEEQGQTQEKCSKEYLERFRREGNEKEMQRILLNSERLKSRIAEIHESRTKLEQQLRAQASDNREIDKRMNSLKPDLMQLRKIRDQYLVWLTQKGARQKKINEWLGIKNETEDQYALMEDEDDLPHHEERTWYVGKINRTQAEEMLSGKRDGTFLIRESSQRGCYACSVVVDGDTKHCVIYRTATGFGFAEPYNLYGSLKELVLHYQHASLVQHNDALTVTLAHPVRAPGPGPPPAAR

SEQ ID NO: 37 - DNA, 2721 bp, Homo sapiens
  Coding sequence for CBL
atggccggcaacgtgaagaagagctctggggccgggggcggcagcggctccgggggctcgggttcgggtggcctgattgggctcatgaaggacgccttccagccgcaccaccaccaccaccaccacctcagcccccacccgccggggacggtggacaagaagatggtggagaagtgctggaagctcatggacaaggtggtgcggttgtgtcagaacccaaagctggcgctaaagaatagcccaccttatatcttagacctgctaccagatacctaccagcatctccgtactatcttgtcaagatatgaggggaagatggagacacttggagaaaatgagtattttagggtgtttatggagaatttgatgaagaaaactaagcaaaccataagcctcttcaaggagggaaaagaaagaatgtatgaggagaattctcagcctaggcgaaacctaaccaaactgtccctcatcttcagccacatgctggcagaactaaaaggaatctttccaagtggactctttcagggagacacatttcggattactaaagcagatgctgcggaattttggagaaaagcttttggggaaaagacaatagtcccttggaagagctttcgacaggctctacatgaagtgcatcccatcagttctgggctggaggccatggctctgaaatccactattgatctgacctgcaatgattatatttcggtttttgaatttgacatctttacccgactctttcagccctggtcctctttgctcaggaattggaacagccttgctgtaactcatcctggctacatggcttttttgacgtatgacgaagtgaaagctcggctccagaaattcattcacaaacctggcagttatatcttccggctgagctgtactcgtctgggtcagtgggctattgggtatgttactgctgatgggaacattctccagacaatccctcacaataaacctctcttccaagcactgattgatggcttcagggaaggcttctatttgtttcctgatggacgaaatcagaatcctgatctgactggcttatgtgaaccaactccccaagaccatatcaaagtgacccaggaacaatatgaattatactgtgagatgggctccacattccaactatgtaaaatatgtgctgaaaatgataaggatgtaaagattgagccctgtggacacctcatgtgcacatcctgtcttacatcctggcaggaatcagaaggtcagggctgtcctttctgccgatgtgaaattaaaggtactgaacccatcgtggtagatccgtttgatcctagagggagtggcagcctgttgaggcaaggagcagagggagctccctccccaaattatgatgatgatgatgatgaacgagctgatgatactctcttcatgatgaaggaattggctggtgccaaggtggaacggccgccttctccattctccatggccccacaagcttcccttcccccggtgccaccacgacttgaccttctgccgcagcgagtatgtgttccctcaagtgcttctgctcttggaactgcttctaaggctgcttctggctcccttcataaagacaaaccattgccagtacctcccacacttcgagatcttccaccaccaccgcctccagaccggccatattctgttggagcagaatcccgacctcaaagacgccccttgccttgtacaccaggcgactgtccctccagagacaaactgccccctgtcccctctagccgccttggagactcatggctgccccggccaatccccaaagtaccagtatctgccccaagttccagtgatccctggacaggaagagaattaaccaaccggcactcacttccattttcattgccctcacaaatggagcccagaccagatgtgcctaggctcggaagcacgttcagtctggatacctccatgagtatgaatagcagcccattagtaggtccagagtgtgaccaccccaaaatcaaaccttcctcatctgccaatgccatttattctctggctgccagacctcttcctgtgccaaaactgccacctggggagcaatgtgagggtgaagaggacacagagtacatgactccctcttccaggcctctacggcctttggatacatcccagagttcacgagcatgtgattgcgaccagcagattgatagctgtacgtatgaagcaatgtataatattcagtcccaggcgccatctatcaccgagagcagcacctttggtgaagggaatttggccgcagcccatgccaacactggtcccgaggagtcagaaaatgaggatgatgggtatgatgtcccaaagccacctgtgccggccgtgctggcccgccgaactctctcagatatctctaatgccagctcctcctttggctggttgtctctggatggtgatcctacaacaaatgtcactgaaggttcccaagttcccgagaggcctccaaaaccattcccgcggagaatcaactctgaacggaaagctggcagctgtcagcaaggtagtggtcctgccgcctctgctgccaccgcctcacctcagctctccagtgagatcgagaacctcatgagtcaggggtactcctaccaggacatccagaaagctttggtcattgcccagaacaacatcgagatggccaaaaacatcctccgggaatttgtttccatttcttctcctgcccatgtagctacctag

SEQ ID NO: 38 - protein, 906 aa, Homo sapiens
  Amino acid sequence of c-Cbl
MAGNVKKSSGAGGGSGSGGSGSGGLIGLMKDAFQPHHHHHHHLSPHPPGTVDKKMVEKCWKLMDKVVRLCQNPKLALKNSPPYILDLLPDTYQHLRTILSRYEGKMETLGENEYFRVFMENLMKKTKQTISLFKEGKERMYEENSQPRRNLTKLSLIFSHMLAELKGIFPSGLFQGDTFRITKADAAEFWRKAFGEKTIVPWKSFRQALHEVHPISSGLEAMALKSTIDLTCNDYISVFEFDIFTRLFQPWSSLLRNWNSLAVTHPGYMAFLTYDEVKARLQKFIHKPGSYIFRLSCTRLGQWAIGYVTADGNILQTIPHNKPLFQALIDGFREGFYLFPDGRNQNPDLTGLCEPTPQDHIKVTQEQYELYCEMGSTFQLCKICAENDKDVKIEPCGHLMCTSCLTSWQESEGQGCPFCRCEIKGTEPIVVDPFDPRGSGSLLRQGAEGAPSPNYDDDDDERADDTLFMMKELAGAKVERPPSPFSMAPQASLPPVPPRLDLLPQRVCVPSSASALGTASKAASGSLHKDKPLPVPPTLRDLPPPPPPDRPYSVGAESRPQRRPLPCTPGDCPSRDKLPPVPSSRLGDSWLPRPIPKVPVSAPSSSDPWTGRELTNRHSLPFSLPSQMEPRPDVPRLGSTFSLDTSMSMNSSPLVGPECDHPKIKPSSSANAIYSLAARPLPVPKLPPGEQCEGEEDTEYMTPSSRPLRPLDTSQSSRACDCDQQIDSCTYEAMYNIQSQAPSITESSTFGEGNLAAAHANTGPEESENEDDGYDVPKPPVPAVLARRTLSDISNASSSFGWLSLDGDPTTNVTEGSQVPERPPKPFPRRINSERKAGSCQQGSGPAASAATASPQLSSEIENLMSQGYSYQDIQKALVIAQNNIEMAKNILREFVSISSPAHVAT

SEQ ID NO: 39 - DNA, 2949 bp, Homo sapiens
  Coding sequence for CBLB
atggcaaactcaatgaatggcagaaaccctggtggtcgaggaggaaatccccgaaaaggtcgaattttgggtattattgatgctattcaggatgcagttggaccccctaagcaagctgccgcagatcgcaggaccgtggagaagacttggaagctcatggacaaagtggtaagactgtgccaaaatcccaaacttcagttgaaaaatagcccaccatatatacttgatattttgcctgatacatatcagcatttacgacttatattgagtaaatatgatgacaaccagaaacttgcccaactcagtgagaatgagtactttaaaatctacattgatagccttatgaaaaagtcaaaacgggcaataagactctttaaagaaggcaaggagagaatgtatgaagaacagtcacaggacagacgaaatctcacaaaactgtcccttatcttcagtcacatgctggcagaaatcaaagcaatctttcccaatggtcaattccagggagataactttcgtatcacaaaagcagatgctgctgaattctggagaaagttttttggagacaaaactatcgtaccatggaaagtattcagacagtgccttcatgaggtccaccagattagctctggcctggaagcaatggctctaaaatcaacaattgatttaacttgcaatgattacatttcagtttttgaatttgatatttttaccaggctgtttcagccttggggctctattttgcggaattggaatttcttagctgtgacacatccaggttacatggcatttctcacatatgatgaagttaaagcacgactacagaaatatagcaccaaacccggaagctatattttccggttaagttgcactcgattgggacagtgggccattggctatgtgactggggatgggaatatcttacagaccatacctcataacaagcccttatttcaagccctgattgatggcagcagggaaggattttatctttatcctgatgggaggagttataatcctgatttaactggattatgtgaacctacacctcatgaccatataaaagttacacaggaacaatatgaattatattgtgaaatgggctccacttttcagctctgtaagatttgtgcagagaatgacaaagatgtcaagattgagccttgtgggcatttgatgtgcacctcttgccttacggcatggcaggagtcggatggtcagggctgccctttctgtcgttgtgaaataaaaggaactgagcccataatcgtggacccctttgatccaagagatgaaggctccaggtgttgcagcatcattgacccctttggcatgccgatgctagacttggacgacgatgatgatcgtgaggagtccttgatgatgaatcggttggcaaacgtccgaaagtgcactgacaggcagaactcaccagtcacatcaccaggatcctctccccttgcccagagaagaaagccacagcctgacccactccagatcccacatctaagcctgccacccgtgcctcctcgcctggatctaattcagaaaggcatagttagatctccctgtggcagcccaacgggttcaccaaagtcttctccttgcatggtgagaaaacaagataaaccactcccagcaccacctcctcccttaagagatcctcctccaccgccacctgaaagacctccaccaatcccaccagacaatagactgagtagacacatccatcatgtggaaagcgtgccttccagagacccgccaatgcctcttgaagcatggtgccctcgggatgtgtttgggactaatcagcttgtgggatgtcgactcctaggggagggctctccaaaacctggaatcacagcgagttcaaatgtcaatggaaggcacagtagagtgggctctgacccagtgcttatgcggaaacacagacgccatgatttgcctttagaaggagctaaggtcttttccaatggtcaccttggaagtgaagaatatgatgttcctccccggctttctcctcctcctccagttaccaccctcctccctagcataaagtgtactggtccgttagcaaattctctttcagagaaaacaagagacccagtagaggaagatgatgatgaatacaagattccttcatcccaccctgtttccctgaattcacaaccatctcattgtcataatgtaaaacctcctgttcggtcttgtgataatggtcactgtatgctgaatggaacacatggtccatcttcagagaagaaatcaaacatccctgacttaagcatatatttaaagggagatgtttttgattcagcctctgatcccgtgccattaccacctgccaggcctccaactcgggacaatccaaagcatggttcttcactcaacaggacgccctctgattatgatcttctcatccctccattaggtgaagatgcttttgatgccctccctccatctctcccacctcccccacctcctgcaaggcatagtctcattgaacattcaaaacctcctggctccagtagccggccatcctcaggacaggatctttttcttcttccttcagatccctttgttgatctagcaagtggccaagttcctttgcctcctgctagaaggttaccaggtgaaaatgtcaaaactaacagaacatcacaggactatgatcagcttccttcatgttcagatggttcacaggcaccagccagaccccctaaaccacgaccgcgcaggactgcaccagaaattcaccacagaaaaccccatgggcctgaggcggcattggaaaatgtcgatgcaaaaattgcaaaactcatgggagagggttatgcctttgaagaggtgaagagagccttagagatagcccagaataatgtcgaagttgcccggagcatcctccgagaatttgccttccctcctccagtatccccacgtctaaatctatag

SEQ ID NO: 40 - protein, 982 aa, Homo sapiens [sequence omitted]

SEQ ID NO: 41 - DNA, 1425 bp, Homo sapiens
  Coding sequence for CBLC
atggctctggcggtggccccgtgggggcgacagtgggaagaggcccgcgccctgggccgggcagtcaggatgctgcagcgcctagaagagcaatgcgtcgacccccggctgtccgtgagtcccccttcgctgcgggacctgctgccccgcacagcgcagctgcttcgagaggtggcccattctcggcgggcggccggcggaggcggccccgggggtcccggcggctctggggactttctactcatctacctggccaatctggaggccaagagcaggcaggtggccgcgctgctgcctccccggggccgaaggagtgccaacgacgagctcttccgggcgggctccagactcaggcgacagctggccaagctggccatcatcttcagccacatgcacgcagagctgcacgcactcttccccgggggaaagtactgtggacacatgtaccagctcaccaaggcccccgcccacaccttctggagggaaagttgcggagcccggtgtgtgctgccctgggctgagtttgagtccctcctgggcacctgccaccctgtggaaccaggctgcacagccctggccttgcgcaccaccattgacctcacctgcagcgggcacgtgtccatcttcgagttcgacgtcttcaccaggctctttcagccatggccaacactcctcaagaactggcagctcctggcagtcacccacccaggctacatggccttcctcacctatgatgaggtccaagagcgtctgcaggcctgcagagacaagccaggcagttacatcttccggcccagctgtactcgcctggggcagtgggccatcggctatgtgagctcagatggcagcatcctgcagaccatccctgccaacaaacccctgtcccaggtgctcctggagggacagaaggacggcttctacctctacccagatggaaagacccacaacccagacctgactgagctcggccaggcagaaccccagcagcgcatccacgtgtcagaggagcagctgcagctctactgggccatggactccacatttgagctctgcaagatctgtgctgagagcaacaaggatgtgaagattgagccgtgcgggcacctgctctgcagctgctgcctggctgcctggcagcactcggacagccagacctgccccttctgccgctgcgagatcaagggctgggaggccgtgagtatctaccagttctacggtcaggctactgctgaggactcagggaacagcagtgaccaggaaggcagggagttggagctggggcaggtgcccctttcggctcctccattgcccccacggccagatctgccccccaggaagcccagaaatgcccagccgaaagtgagactcctaaaggggaactcccctccagctgcgctgggaccccaggaccctgccccggcctga

SEQ ID NO: 42 - protein, 474 aa, Homo sapiens
  Amino acid sequence of Cblc
MALAVAPWGRQWEEARALGRAVRMLQRLEEQCVDPRLSVSPPSLRDLLPRTAQLLREVAHSRRAAGGGGPGGPGGSGDFLLIYLANLEAKSRQVAALLPPRGRRSANDELFRAGSRLRRQLAKLAIIFSHMHAELHALFPGGKYCGHMYQLTKAPAHTFWRESCGARCVLPWAEFESLLGTCHPVEPGCTALALRTTIDLTCSGHVSIFEFDVFTRLFQPWPTLLKNWQLLAVTHPGYMAFLTYDEVQERLQACRDKPGSYIFRPSCTRLGQWAIGYVSSDGSILQTIPANKPLSQVLLEGQKDGFYLYPDGKTHNPDLTELGQAEPQQRIHVSEEQLQLYWAMDSTFELCKICAESNKDVKIEPCGHLLCSCCLAAWQHSDSQTCPFCRCEIKGWEAVSIYQFYGQATAEDSGNSSDQEGRELELGQVPLSAPPLPPRPDLPPRKPRNAQPKVRLLKGNSPPAALGPQDPAPA

SEQ ID NO: 43 - DNA, 618 bp, Homo sapiens
  Coding sequence for RGS4
atgtgcaaagggcttgcaggtctgccggcttcttgcttgaggagtgcaaaagatatgaaacatcggctaggtttcctgctgcaaaaatctgattcctgtgaacacaattcttcccacaacaagaaggacaaagtggttatttgccagagagtgagccaagaggaagtcaagaaatgggctgaatcactggaaaacctgattagtcatgaatgtgggctggcagctttcaaagctttcttgaagtctgaatatagtgaggagaatattgacttctggatcagctgtgaagagtacaagaaaatcaaatcaccatctaaactaagtcccaaggccaaaaagatctataatgaattcatctcagtccaggcaaccaaagaggtgaacctggattcttgcaccagggaagagacaagccggaacatgctagagcctacaataacctgctttgatgaggcccagaagaagattttcaacctgatggagaaggattcctaccgccgcttcctcaagtctcgattctatcttgatttggtcaacccgtccagctgtggggcagaaaagcagaaaggagccaagagttcagcagactgtgcttccctggtccctcagtgtgcctaa

SEQ ID NO: 44 - protein, 205 aa, Homo sapiens
  Amino acid sequence of Rgs4
MCKGLAGLPASCLRSAKDMKHRLGFLLQKSDSCEHNSSHNKKDKVVICQRVSQEEVKKWAESLENLISHECGLAAFKAFLKSEYSEENIDFWISCEEYKKIKSPSKLSPKAKKIYNEFISVQATKEVNLDSCTREETSRNMLEPTITCFDEAQKKIFNLMEKDSYRRFLKSRFYLDLVNPSSCGAEKQKGAKSSADCASLVPQCA

SEQ ID NO: 45 - DNA, 3876 bp, Homo sapiens
  Coding sequence for PLCG1
atggcgggcgccgcgtccccttgcgccaacggctgcgggcccggcgcgccctcggacgccgaggtgctgcacctctgccgcagcctcgaggtgggcaccgtcatgactttgttctactccaagaagtcgcagcgacccgagcggaagaccttccaggtcaagctggagacgcgccagatcacgtggagccggggcgccgacaagatcgagggggccattgacattcgtgaaattaaggagatccgcccagggaagacctcacgggactttgatcgctatcaagaggacccagctttccggccggaccagtcacattgctttgtcattctctatggaatggaatttcgcctgaaaacgctgagcctgcaagccacatctgaggatgaagtgaacatgtggatcaagggcttaacttggctgatggaggatacattgcaggcacccacacccctgcagattgagaggtggctccggaagcagttttactcagtggatcggaatcgtgaggatcgtatatcagccaaggacctgaagaacatgctgtcccaggtcaactaccgggtccccaacatgcgcttcctccgagagcggctgacggacctggagcagcgcagcggggacatcacctacgggcagtttgctcagctgtaccgcagcctcatgtacagcgcccagaagacgatggacctccccttcttggaagccagtactctgagggctggggagcggccggagctttgccgagtgtcccttcctgagttccagcagttccttcttgactaccagggggagctgtgggctgttgatcgcctccaggtgcaggagttcatgctcagcttcctccgagaccccttacgagagatcgaggagccatacttcttcctggatgagtttgtcaccttcctgttctccaaagagaacagtgtgtggaactcgcagctggatgcagtatgcccggacaccatgaacaaccctctttcccactactggatctcctcctcgcacaacacgtacctgaccggggaccagttctccagtgagtcctccttggaagcctatgctcgctgcctgcggatgggctgtcgctgcattgagttggactgctgggacggcccggatgggatgccagttatttaccatgggcacacccttaccaccaagatcaagttctcagatgtcctgcacaccatcaaggagcatgcctttgtggcctcagagtacccagtcatcctgtccattgaggaccactgcagcattgcccagcagagaaacatggcccaatacttcaagaaggtgctgggggacacactcctcaccaagcccgtggagatctctgccgacgggctcccctcacccaaccagcttaagaggaagatcctcatcaagcacaagaagctggctgagggcagtgcctacgaggaggtgcctacatccatgatgtactctgagaacgacatcagcaactctatcaagaatggcatcctctacctggaggaccctgtgaaccacgaatggtatccccactactttgttctgaccagcagcaagatctactactctgaggagaccagcagtgaccagggcaacgaggatgaggaggagcccaaggaggtcagcagcagcacagagctgcactccaatgagaagtggttccatgggaagctaggggcagggcgtgacgggcgtcacatcgctgagcgcctgcttactgagtactgcatcgagaccggagcccctgacggctccttcctcgtgcgagagagtgagaccttcgtgggcgactacacgctctctttctggcggaacgggaaagtccagcactgccgtatccactcccggcaagatgctgggacccccaagttcttcttgacagacaacctcgtctttgactccctctatgacctcatcacgcactaccagcaggtgcccctgcgctgtaatgagtttgagatgcgactttcagagcctgtcccacagaccaacgcccacgagagcaaagagtggtaccacgcgagcctgaccagagcacaggctgagcacatgctaatgcgcgtccctcgtgatggggccttcctggtgcggaagcggaatgaacccaactcatatgccatctctttccgggctgagggcaagatcaagcattgccgtgtccagcaagagggccagacagtgatgctagggaactcggagttcgacagccttgttgacctcatcagctactatgagaaacacccgctataccgcaagatgaagctgcgctatcccatcaacgaggaggcactggagaagattggcacagctgagcctgactacggggccctgtatgagggacgcaaccctggcttctatgtagaggcaaaccctatgccaactttcaagtgtgcagtcaaagccctctttgactacaaggcccagagggaggacgagctgaccttcatcaagagcgccatcatccagaatgtggagaagcaagagggaggctggtggcgaggggactacggagggaagaagcagctgtggttcccatcaaactacgtggaagagatggtcaaccccgtggccctggagccggagagggagcacttggacgagaacagccccctaggggacttgctgcggggggtcttggatgtgccggcttgtcagattgccatccgtcctgagggcaagaacaaccggctcttcgtcttctccatcagcatggcgtcggtggcccactggtccctggatgttgctgccgactcacaggaggagctgcaggactgggtgaaaaagatccgtgaagtggcccagacagcagacgccaggctcactgaagggaagataatggaacggaggaagaagattgccctggagctctctgaacttgtcgtctactgccggcctgttccctttgatgaagagaagattggcacagaacgtgcttgctaccgggacatgtcatccttcccggaaaccaaggctgagaaatacgtgaacaaggccaaaggcaagaagttccttcagtacaatcgactgcagctctcccgcatctaccccaagggccagcgactggattcctccaactacgatcctttgcccatgtggatctgtggcagtcagcttgtggccctcaacttccagacccctgacaagcctatgcagatgaaccaggccctcttcatgacgggcaggcactgtggctacgtgctgcagccaagcaccatgcgggatgaggccttcgacccctttgacaagagcagcctccgcgggctggagccatgtgccatctctattgaggtgctgggggcccgacatctgccaaagaatggccgaggcattgtgtgtccttttgtggagattgaggtggctggagctgagtatgacagcaccaagcagaagacagagtttgtggtggacaatggactcaaccctgtatggccagccaagcccttccacttccagatcagtaaccctgaatttgcctttctgcgcttcgtggtgtatgaggaagacatgtttagtgaccagaatttcctggctcaggctactttcccagtaaaaggcctgaagacaggatacagagcagtgcctttgaagaacaactacagtgaggacctggagttggcctccctgctgatcaagattgacattttccctgccaagcaggagaatggtgacctcagtcccttcagtggtacgtccctgcgggagcggggctcagatgcctcaggccagctgtttcatggccgagcccgggaaggctcctttgaatcccgctaccagcagccgtttgaggacttccgcatctcccaggagcatctcgcagaccattttgacagtcgagaacgaagggccccaagaaggactcgggtcaatggagacaaccgcctctag

SEQ ID NO: 46 - protein, 1291 aa, Homo sapiens
  Amino acid sequence of PlCgamma1
MAGAASPCANGCGPGAPSDAEVLHLCRSLEVGTVMTLFYSKKSQRPERKTFQVKLETRQITWSRGADKIEGAIDIREIKEIRPGKTSRDFDRYQEDPAFRPDQSHCFVILYGMEFRLKTLSLQATSEDEVNMWIKGLTWLMEDTLQAPTPLQIERWLRKQFYSVDRNREDRISAKDLKNMLSQVNYRVPNMRFLRERLTDLEQRSGDITYGQFAQLYRSLMYSAQKTMDLPFLEASTLRAGERPELCRVSLPEFQQFLLDYQGELWAVDRLQVQEFMLSFLRDPLREIEEPYFFLDEFVTFLFSKENSVWNSQLDAVCPDTMNNPLSHYWISSSHNTYLTGDQFSSESSLEAYARCLRMGCRCIELDCWDGPDGMPVIYHGHTLTTKIKFSDVLHTIKEHAFVASEYPVILSIEDHCSIAQQRNMAQYFKKVLGDTLLTKPVEISADGLPSPNQLKRKILIKHKKLAEGSAYEEVPTSMMYSENDISNSIKNGILYLEDPVNHEWYPHYFVLTSSKIYYSEETSSDQGNEDEEEPKEVSSSTELHSNEKWFHGKLGAGRDGRHIAERLLTEYCIETGAPDGSFLVRESETFVGDYTLSFWRNGKVQHCRIHSRQDAGTPKFFLTDNLVFDSLYDLITHYQQVPLRCNEFEMRLSEPVPQTNAHESKEWYHASLTRAQAEHMLMRVPRDGAFLVRKRNEPNSYAISFRAEGKIKHCRVQQEGQTVMLGNSEFDSLVDLISYYEKHPLYRKMKLRYPINEEALEKIGTAEPDYGALYEGRNPGFYVEANPMPTFKCAVKALFDYKAQREDELTFIKSAIIQNVEKQEGGWWRGDYGGKKQLWFPSNYVEEMVNPVALEPEREHLDENSPLGDLLRGVLDVPACQIAIRPEGKNNRLFVFSISMASVAHWSLDVAADSQEELQDWVKKIREVAQTADARLTEGKIMERRKKIALELSELVVYCRPVPFDEEKIGTERACYRDMSSFPETKAEKYVNKAKGKKFLQYNRLQLSRIYPKGQRLDSSNYDPLPMWICGSQLVALNFQTPDKPMQMNQALFMTGRHCGYVLQPSTMRDEAFDPFDKSSLRGLEPCAISIEVLGARHLPKNGRGIVCPFVEIEVAGAEYDSTKQKTEFVVDNGLNPVWPAKPFHFQISNPEFAFLRFVVYEEDMFSDQNFLAQATFPVKGLKTGYRAVPLKNNYSEDLELASLLIKIDIFPAKQENGDLSPFSGTSLRERGSDASGQLFHGRAREGSFESRYQQPFEDFRISQEHLADHFDSRERRAPRRTRVNGDNRL

SEQ ID NO: 47 - DNA, 1308 bp, Homo sapiens
  Coding sequence for PTPN1
atggagatggaaaaggagttcgagcagatcgacaagtccgggagctgggcggccatttaccaggatatccgacatgaagccagtgacttcccatgtagagtggccaagcttcctaagaacaaaaaccgaaataggtacagagacgtcagtccctttgaccatagtcggattaaactacatcaagaagataatgactatatcaacgctagtttgataaaaatggaagaagcccaaaggagttacattcttacccagggccctttgcctaacacatgcggtcacttttgggagatggtgtgggagcagaaaagcaggggtgtcgtcatgctcaacagagtgatggagaaaggttcgttaaaatgcgcacaatactggccacaaaaagaagaaaaagagatgatctttgaagacacaaatttgaaattaacattgatctctgaagatatcaagtcatattatacagtgcgacagctagaattggaaaaccttacaacccaagaaactcgagagatcttacatttccactataccacatggcctgactttggagtccctgaatcaccagcctcattcttgaactttcttttcaaagtccgagagtcagggtcactcagcccggagcacgggcccgttgtggtgcactgcagtgcaggcatcggcaggtctggaaccttctgtctggctgatacctgcctcttgctgatggacaagaggaaagacccttcttccgttgatatcaagaaagtgctgttagaaatgaggaagtttcggatggggctgatccagacagccgaccagctgcgcttctcctacctggctgtgatcgaaggtgccaaattcatcatgggggactcttccgtgcaggatcagtggaaggagctttcccacgaggacctggagcccccacccgagcatatccccccacctccccggccacccaaacgaatcctggagccacacaatgggaaatgcagggagttcttcccaaatcaccagtgggtgaaggaagagacccaggaggataaagactgccccatcaaggaagaaaaaggaagccccttaaatgccgcaccctacggcatcgaaagcatgagtcaagacactgaagttagaagtcgggtcgtggggggaagtcttcgaggtgcccaggctgcctccccagccaaaggggagccgtcactgcccgagaaggacgaggaccatgcactgagttactggaagcccttcctggtcaacatgtgcgtggctacggtcctcacggccggcgcttacctctgctacaggttcctgttcaacagcaacacatag

SEQ ID NO: 48 - protein, 435 aa, Homo sapiens
  Amino acid sequence of Ptp-1B
MEMEKEFEQIDKSGSWAAIYQDIRHEASDFPCRVAKLPKNKNRNRYRDVSPFDHSRIKLHQEDNDYINASLIKMEEAQRSYILTQGPLPNTCGHFWEMVWEQKSRGVVMLNRVMEKGSLKCAQYWPQKEEKEMIFEDTNLKLTLISEDIKSYYTVRQLELENLTTQETREILHFHYTTWPDFGVPESPASFLNFLFKVRESGSLSPEHGPVVVHCSAGIGRSGTFCLADTCLLLMDKRKDPSSVDIKKVLLEMRKFRMGLIQTADQLRFSYLAVIEGAKFIMGDSSVQDQWKELSHEDLEPPPEHIPPPPRPPKRILEPHNGKCREFFPNHQWVKEETQEDKDCPIKEEKGSPLNAAPYGIESMSQDTEVRSRVVGGSLRGAQAASPAKGEPSLPEKDEDHALSYWKPFLVNMCVATVLTAGAYLCYRFLFNSNT

SEQ ID NO: 49 - DNA, 1998 bp, Homo sapiens
  Coding sequence for SH3KBP1
atggtggaggccatagtggagtttgactaccaggcccagcacgatgatgagctgacgatcagcgtgggtgaaatcatcaccaacatcaggaaggaggatggaggctggtgggagggacagatcaacggcaggagaggtttgttccctgacaactttgtaagagaaataaagaaagagatgaagaaagaccctctcaccaacaaagctccagaaaagcccctgcacgaagtgcccagtggaaactctttgctgtcttctgaaacgattttaagaaccaataagagaggcgagcgacggaggcgccggtgccaggtggcattcagctacctgccccagaatgacgatgaacttgagctgaaagttggcgacatcatagaggtggtaggagaggtagaggaaggatggtgggaaggtgttctcaacgggaagactggaatgtttccttccaacttcatcaaggagctgtcaggggagtcggatgagcttggcatttcccaggatgagcagctatccaagtcaagtttaagggaaaccacaggctccgagagtgatgggggtgactcaagcagcaccaagtctgaaggtgccaacgggacagtggcaactgcagcaatccagcccaagaaagttaagggagtgggctttggagacattttcaaagacaagccaatcaaactaagaccaaggtcaattgaagtagaaaatgactttctgccggtagaaaagactattgggaagaagttacctgcaactacagcaactccagactcatcaaaaacagaaatggacagcaggacaaagagcaaggattactgcaaagtaatatttccatatgaggcacagaatgatgatgaattgacaatcaaagaaggagatatagtcactctcatcaataaggactgcatcgacgtaggctggtgggaaggagagctgaacggcagacgaggcgtgttccccgataacttcgtgaagttacttccaccggactttgaaaaggaagggaatagacccaagaagccaccgcctccatccgctcctgtcatcaaacaaggggcaggcaccactgagagaaaacatgaaattaaaaagatacctcctgaaagaccagaaatgcttccaaacagaacagaagaaaaagaaagaccagagagagagccaaaactggatttacagaagccctccgttcctgccataccgccaaaaaagcctcggccacctaagaccaattctctcagcagacctggcgcactgcccccgagaaggccggagagaccggtgggtccgctgacacacaccaggggtgacagtccaaagattgacttggccggcagttcgctatctggcatcctggacaaagatctctcggaccgcagcaatgacattgacttagaaggttttgactccgtggtatcatctactgagaaactcagtcatccgaccacaagcagaccaaaagctacagggaggcggcctccgtcccagtccctcacatcttcatccctttcaagccctgatatcttcgactccccaagtcccgaagaggataaggaggaacacatttcacttgcgcacagaggagtggacgcgtcaaagaaaacttccaagactgttaccatatcccaagtgtctgacaacaaagcatccctgccgcccaagccggggaccatggcagcaggtggcggtgggccagcccctctgtcctcagcggcgccctcccccctgtcatcctctttgggaacagctggacacagagccaactccccgtctctgttcggcacggaaggaaaaccaaagatggagcctgcggccagcagccaggcggccgtggaggagctaaggacacaggtccgcgagctgaggagcatcatcgagaccatgaaggaccagcagaaacgagagattaaacagttattgtctgagttggatgaagagaagaaaatccggcttcggttgcagatggaagtgaacgacataaagaaagctctacaatcaaaatga

SEQ ID NO: 50 - protein, 665 aa, Homo sapiens
  Amino acid sequence of Cin85
MVEAIVEFDYQAQHDDELTISVGEIITNIRKEDGGWWEGQINGRRGLFPDNFVREIKKEMKKDPLTNKAPEKPLHEVPSGNSLLSSETILRTNKRGERRRRRCQVAFSYLPQNDDELELKVGDIIEVVGEVEEGWWEGVLNGKTGMFPSNFIKELSGESDELGISQDEQLSKSSLRETTGSESDGGDSSSTKSEGANGTVATAAIQPKKVKGVGFGDIFKDKPIKLRPRSIEVENDFLPVEKTIGKKLPATTATPDSSKTEMDSRTKSKDYCKVIFPYEAQNDDELTIKEGDIVTLINKDCIDVGWWEGELNGRRGVFPDNFVKLLPPDFEKEGNRPKKPPPPSAPVIKQGAGTTERKHEIKKIPPERPEMLPNRTEEKERPEREPKLDLQKPSVPAIPPKKPRPPKTNSLSRPGALPPRRPERPVGPLTHTRGDSPKIDLAGSSLSGILDKDLSDRSNDIDLEGFDSVVSSTEKLSHPTTSRPKATGRRPPSQSLTSSSLSSPDIFDSPSPEEDKEEHISLAHRGVDASKKTSKTVTISQVSDNKASLPPKPGTMAAGGGGPAPLSSAAPSPLSSSLGTAGHRANSPSLFGTEGKPKMEPAASSQAAVEELRTQVRELRSIIETMKDQQKREIKQLLSELDEEKKIRLRLQMEVNDIKKALQSK

SEQ ID NO: 51 - DNA, 4260 bp, Homo sapiens
  Coding sequence for TENC1
atggatgggggtggagtatgtgttgggaggggggacctcctgtccagtcctcaggccctgggacagctgctgaggaaggagagcagacccaggagagccatgaagcctaggaaagctgagcctcatagcttccgggagaaggttttccggaagaaacctccagtctgtgcagtatgtaaggtgaccatcgatgggacaggcgtttcgtgcagagtctgcaaggtggcgacgcacagaaaatgtgaagcaaaggtgacttcagcctgtcaggccttgcctcccgtggagttgcggcgaaacacggccccagtcaggcgcatagagcacctgggatccaccaaatctctgaaccactcaaagcagcgcagcactctgcccaggagcttcagcctggacccgctcatggagcggcgctgggacttagacctcacctacgtgacggagcgcatcttggccgccgccttccccgcgcggcccgatgaacagcggcaccggggccacctgcgcgagctggcccatgtgctgcaatccaagcaccgggacaagtacctgctcttcaacctttcagagaaaaggcatgacctgacccgcttaaaccccaaggttcaagacttcggctggcctgagctgcatgctccacccctggacaagctgtgctccatctgcaaagccatggagacatggctcagtgctgacccacagcacgtggtcgtactatactgcaagggaaacaagggcaagcttggggtcatcgtttctgcctacatgcactacagcaagatctctgcaggggcggaccaggcactggccactcttaccatgcggaaattctgcgaggacaaggtggccacagaactgcagccctcccagcgtcgatatatcagctacttcagtgggctgctatctggctccatcagaatgaacagcagccctctcttcctgcactatgtgctcatccccatgctgccagcctttgaacctggcacaggcttccagcccttccttaaaatctaccagtccatgcagcttgtctacacatctggagtctatcacattgcaggccctggtccccagcagctttgcatcagcctggagccagccctcctcctcaaaggcgatgtcatggtaacatgttatcacaagggtggccggggcacagaccggaccctcgtgttccgagtccagttccacacctgcaccatccacggaccacagctcactttccccaaggaccagcttgacgaggcctggactgatgagaggttccccttccaagcctccgtggagtttgtcttctcctccagccccgagaagatcaaaggcagcactccacggaacgacccctcggtctctgtcgactacaacaccactgagccagccgtgcgctgggactcctatgagaacttcaaccagcaccacgaggacagtgtggatggctccttgacccacacccggggtcccctggatggcagtccttatgcccaggtgcagcggcctccccggcagacccccccggcaccctctccagagcctccaccaccccccatgctctctgtcagcagcgactcaggccattcctccacgctgaccacagagccggctgctgagtcccctggccggccgccccctacagctgctgaacggcaggagctggatcgcctcctaggaggctgcggagtggccagtgggggccggggagctgggcgcgagacggccatcctagatgacgaagagcagcccactgtgggcggaggcccccacctcggagtgtatccaggccataggcctggcctcagccgccactgctcctgccgccagggctaccgggagccctgcggggttcccaatgggggctactaccggccagagggaaccctggagaggaggcgactggcctacgggggctatgagggatccccccagggctacgccgaggcctcgatggagaagaggcgcctctgccgatcgctgtcagaggggctatacccctacccacctgagatggggaaaccagccactggggactttggctaccgcgccccaggctaccgggaggtggtcatcctggaggaccctgggctgcctgccctatacccatgcccagcctgcgaggagaagctggcgctgcctacagcagccttgtatggactgcggctggagagggaggctggagaagggtgggcaagtgaggctggcaagcctctcctgcacccagtgcggcctgggcacccgctgcctctgctcttgcctgcctgtgggcatcaccatgccccgatgcctgactacagctgcctgaagccacccaaggcaggcgaggaagggcacgagggctgctcctacaccatgtgccccgaaggcaggtatgggcatccagggtaccctgccctggtgacatacagctatggaggagcagttcccagttactgcccagcatatggccgtgtgcctcatagctgtggctctccaggagagggcagagggtatcccagccctggtgcccactccccacgggctggctccatttccccgggcagcccgccctatccacaatctaggaagctgagctacgagatccctacggaggagggaggggacaggtacccattgcctgggcacctggcctcagcaggacctttggcatctgcagagtcgctggagccggtgtcctggagggagggccccagtgggcacagcacactgcctcggtctccccgagatgccccatgcagtgcttcgtcagagttgtctggtccctccacgcccctgcacaccagcagtccagtccagggcaaggaaagcacccggcgacaggacaccaggtcccccacctcagcgcccactcagagactgagtcctggcgaggccttgccccctgtttcccaggcaggcaccggaaaggcccctgagctgccgtcgggaagtgggcctgagcctctggcccctagcccagtctctccgaccttccctcccagctcgcccagtgactggcctcaggaaaggagtccagggggccactcagatggcgccagtcctcggagccctgtgcccaccacacttcctggcctccgccacgccccctggcaaggccctcgaggcccccccgacagcccagatgggtctcccctcactcctgtgccttcccagatgccctggcttgtggccagcccagagccgcctcagagctcacctacacctgctttccccctggctgcctcctatgacaccaatggccttagccagcccccacttcctgagaaacgccacctgcccgggccggggcaacagccaggaccctggggcccagagcaggcatcatcgccagccagaggcatcagtcaccatgtcaccttcgcacctctgctctcagataatgtcccccaaaccccagagcctcctacacaagagagccaaagcaatgtcaagtttgtccaggatacatccaagttctggtacaagccacacctgtcccgtgaccaagccattgccctgctgaaggacaaggaccctggggccttcctgatcagggacagtcattcattccaaggagcttatgggctggccctcaaggtggccacaccgccacccagtgcccagccctggaaaggggaccccgtggaacagctggtccgccatttcctcatcgagactgggcccaaaggggtgaagatcaagggctgccccagtgagccctactttggcagcctgtccgccttggtctcccagcactccatctcccccatctccctgccctgctgcctgcgcattcccagcaaagatcctctggaagagaccccagaggctccagtgcccaccaacatgagcacagcggcagacctcctgcgtcagggtgctgcctgcagcgtgctctacttgacctcagtggagacagagtcactgacgggcccccaagctgtggcccgggccagctctgcagctctgagctgtagcccccgcccgacaccagctgttgtccacttcaaggtgtcagcccagggcattacactgacggacaaccaaaggaagctcttctttcgccgccattatccagtgaacagcatcaccttctccagcactgaccctcaagaccggagatggaccaacccagacgggaccacctccaagatctttggtttcgtggccaagaagccgggaagcccctgggagaatgtgtgtcacctctttgcagagcttgacccagatcagcctgctggcgccattgtcaccttcatcaccaaagttctactgggccagagaaaatga

SEQ ID NO: 52 - protein, 1419 aa, Homo sapiens
  Amino acid sequence of tensin1
MDGGGVCVGRGDLLSSPQALGQLLRKESRPRRAMKPRKAEPHSFREKVFRKKPPVCAVCKVTIDGTGVSCRVCKVATHRKCEAKVTSACQALPPVELRRNTAPVRRIEHLGSTKSLNHSKQRSTLPRSFSLDPLMERRWDLDLTYVTERILAAAFPARPDEQRHRGHLRELAHVLQSKHRDKYLLFNLSEKRHDLTRLNPKVQDFGWPELHAPPLDKLCSICKAMETWLSADPQHVVVLYCKGNKGKLGVIVSAYMHYSKISAGADQALATLTMRKFCEDKVATELQPSQRRYISYFSGLLSGSIRMNSSPLFLHYVLIPMLPAFEPGTGFQPFLKIYQSMQLVYTSGVYHIAGPGPQQLCISLEPALLLKGDVMVTCYHKGGRGTDRTLVFRVQFHTCTIHGPQLTFPKDQLDEAWTDERFPFQASVEFVFSSSPEKIKGSTPRNDPSVSVDYNTTEPAVRWDSYENFNQHHEDSVDGSLTHTRGPLDGSPYAQVQRPPRQTPPAPSPEPPPPPMLSVSSDSGHSSTLTTEPAAESPGRPPPTAAERQELDRLLGGCGVASGGRGAGRETAILDDEEQPTVGGGPHLGVYPGHRPGLSRHCSCRQGYREPCGVPNGGYYRPEGTLERRRLAYGGYEGSPQGYAEASMEKRRLCRSLSEGLYPYPPEMGKPATGDFGYRAPGYREVVILEDPGLPALYPCPACEEKLALPTAALYGLRLEREAGEGWASEAGKPLLHPVRPGHPLPLLLPACGHHHAPMPDYSCLKPPKAGEEGHEGCSYTMCPEGRYGHPGYPALVTYSYGGAVPSYCPAYGRVPHSCGSPGEGRGYPSPGAHSPRAGSISPGSPPYPQSRKLSYEIPTEEGGDRYPLPGHLASAGPLASAESLEPVSWREGPSGHSTLPRSPRDAPCSASSELSGPSTPLHTSSPVQGKESTRRQDTRSPTSAPTQRLSPGEALPPVSQAGTGKAPELPSGSGPEPLAPSPVSPTFPPSSPSDWPQERSPGGHSDGASPRSPVPTTLPGLRHAPWQGPRGPPDSPDGSPLTPVPSQMPWLVASPEPPQSSPTPAFPLAASYDTNGLSQPPLPEKRHLPGPGQQPGPWGPEQASSPARGISHHVTFAPLLSDNVPQTPEPPTQESQSNVKFVQDTSKFWYKPHLSRDQAIALLKDKDPGAFLIRDSHSFQGAYGLALKVATPPPSAQPWKGDPVEQLVRHFLIETGPKGVKIKGCPSEPYFGSLSALVSQHSISPISLPCCLRIPSKDPLEETPEAPVPTNMSTAADLLRQGAACSVLYLTSVETESLTGPQAVARASSAALSCSPRPTPAVVHFKVSAQGITLTDNQRKLFFRRHYPVNSITFSSTDPQDRRWTNPDGTTSKIFGFVAKKPGSPWENVCHLFAELDPDQPAGAIVTFITKVLLGQRK

SEQ ID NO: 53 - DNA, 5217 bp, Homo sapiens
  Coding sequence for RICS
atgaagtctcgtccaacaaaacagaagctgaagcagcggggaatcttgaaagagagggtgtttggttgtgacctgggggagcaccttctaaattctggttttgaagtgccgcaggttcttcaaagctgcacagcattcattgagagatatggcatcgtggatggaatctatcgcctttctggtgttgcctccaatatccagagactacgccatgaatttgactctgagcacgtccccgacctgacgaaagaaccgtatgttcaggacatccattctgtgggttccctatgtaagctgtacttccgggaactcccaaaccctctgcttacctaccagctgtatgagaaattttctgatgcagtttcagcagcaacagatgaagaaaggctgataaaaatccacgatgtcatccagcagctccccccaccacactacagaacactggagttcctgatgagacacttgtctcttctagctgactattgttccatcacaaatatgcatgcaaaaaatctagcaattgtttgggctccaaacctgttaagatcaaaacagatagaatctgcctgcttcagtggaacagcagctttcatggaagtgaggattcagtctgtggttgttgagttcatcctgaatcacgttgatgtgctgttcagcggcagaatcagcatggccatgcaagagggggcagcttctctatcaaggcccaagtccctcctggtatcctctccatccaccaaactgctgacattggaagaggcccaggcacgaacacaagctcaggtcaattctccaattgtgacggaaaataaatatatcgaagtaggagaaggacctgctgcacttcaggggaaatttcataccataattgagttcccacttgaaagaaagaggcctcaaaataagatgaaaaagtctcctgtgggtagctggcgttcctttttcaacttggggaaatcatcatctgtttctaaacgaaagctgcagcggaatgagagtgagccttcagagatgaaagccatggctctgaaaggtggcagggcagaaggaaccctccgttcagctaaaagtgaggagtctcttacatctctccatgcagttgatggtgattctaagctcttccgacccagaagacccagatcttccagtgatgcactgtctgcctcttttaatggagaaatgctggggaaccgctgtaactcctatgataatctgcctcatgacaatgagagtgaggaggaaggagggctgcttcatatcccagcccttatgtctcctcattcagctgaggatgttgacttgagcccaccagacattggagtagccagcctggattttgatccaatgtcatttcaatgtagtcctcctaaggccgaatcagaatgtctggagagtggtgcttcctttttagattcaccaggatactccaaggataaaccaagtgccaataaaaaggatgcagaaacaggtagtagccaatgtcagactccaggaagcacagcaagctctgaacctgtctctcctcttcaggagaaactgagtccattctttaccctggacttgagcccaactgaagataaatcatctaagccatcctcctttactgaaaaggtcgtctatgctttctctccgaagataggacggaaattaagcaaatcaccttctatgagcatatctgagccaatttcagtgaccctaccaccacgggtgtcagaagtcattggtacagtctcaaataccacagctcagaatgcatcatcttcaacctgggacaaatgcgttgaagaaagggatgccacaaatagatcccccacccagatagtaaagatgaaaacaaatgagacagttgcccaagaagcatatgaatctgaagtccagcccctggaccaggtggctgctgaagaagtagaattgccagggaaagaggatcagtctgtctcaagcagtcagagtaaggctgtagcttctggacagactcagacaggagcagttacccatgacccccctcaggattccgttcctgtcagttcagtctctcttatcccaccaccaccgcctccgaaaaatgttgcccgaatgttggcgctagcattagctgagtccgcacagcaagcctcaactcagtcattgaagagaccagggacctctcaggctgggtatacaaattatggagacatagcggtggctacaactgaagataatctgtccagttcttactctgcagttgctctagataaggcctatttccaaaccgatcgaccagcagagcagttccacctccagaataatgcaccaggaaactgtgaccatcctctaccagagacaacagctactggggatcctacccattccaacacaactgaatctggggagcaacatcaccaagtagacttaacagggaatcagccacatcaagcatatttatctggggacccagaaaaggccagaattacttcagttcccttagactcagagaagtctgatgatcatgtaagtttccctgaagaccagtctgggaagaacagtatgccaactgtctccttcttggatcaggaccagtctccaccccgtttctacagtggagatcagcctccttcttatcttggtgcaagtgtggataaactccatcaccctttagaatttgcagacaaatctcccacacctcctaatttacctagcgataaaatctaccctccttctgggtcccccgaagagaataccagcacagccaccatgacttacatgacaactactccagcaacagcccaaatgagcaccaaggaagccagctgggatgtggctgaacaacccaccactgctgattttgctgctgccacacttcagcgcacgcacagaactaatcgtccccttccccctccgccttcccagagatctgcagagcagccaccagttgtggggcaggtacaagcagcaaccaatataggattaaataattcccacaaggttcaaggagtagttccagttccagagaggccacctgaacctcgagccatggatgaccctgcgtctgccttcatcagtgacagtggtgctgctgctgctcagtgtcccatggctacagctgtccagccaggcctgcctgagaaagtgcgggacggtgcccgggtcccgctgctgcacctgcgcgccgagtctgtccctgcgcatccctgtggctttcctgcaccactgccccccaccaggatgatggagagtaagatgattgctgccatacactccagcagtgcagatgccaccagcagttcaaattatcattcctttgtcactgcttcatccacctctgtggacgatgcattgcctttaccacttcctgtcccacaacctaagcatgcttctcagaaaacagtttactcctcctttgctaggcccgatgtcaccactgaaccctttggtccagataactgtttgcatttcaatatgactccaaactgccagtaccgtccccagagtgtacctccccatcacaataaattggagcagcaccaagtgtatggtgccaggtcagagccaccagcctccatgggtcttcgttataacacatatgtggccccaggaagaaacgcatctggacaccactccaagccatgcagccgggtcgagtatgtgtcttctttgagctcctctgtcaggaatacctgttaccccgaagacattccaccgtaccctaccatccggagagtgcagtctctccatgctccgccgtcttccatgattcgctctgttcccatttcacggacagaagttcccccagatgatgagccagcctactgcccaagacctctgtaccaatataagccatatcagtcctcccaggcccgctcagattatcatgtcactcagcttcagccttactttgagaatggccgggtccactacaggtatagcccatattccagttcttctagttcctattacagtccagatggggccctgtgtgatgtggatgcctatggcacagtccagttgagaccccttcaccgccttcccaatcgagactttgctttctacaatcctaggctgcaaggaaagagcttgtacagttatgctggtttggctccacgtccccgggccaacgtgactggctatttctctcccaacgaccataatgtagtcagcatgcctccggctgctgatgtgaagcacacctacacctcatgggatcttgaggacatggaaaaataccgcatgcagtccatccggagagagagccgtgctcggcagaaggtgaaagggcctgtcatgtcccaatatgataacatgaccccggcggtgcaggacgacttgggtgggatctatgtcatccatctgcgtagtaaatcagatcctgggaaaactggacttctctcagtggcagaaggaaaggagagccgccatgcagccaaggccatcagtcccgagggagaggaccgcttctataggaggcatcccgaggcagagatggacagagcccaccatcacggaggccatggtagcacgcagccggagaagccatccctgcctcagaagcagagcagcctgaggagcaggaagcttcctgacatgggctgcagtcttcctgagcacagggcacaccaagaagcaagccataggcagttctgtgagtcaaagaatgggcccccttatccccagggagctggccagttagattatgggtccaaagggattccagacacttctgagccagtcagctaccacaactctggagtaaaatatgctgcatccgggcaagaatctttaagactgaaccacaaagaggtaaggctctccaaagagatggagcgaccctgggttaggcagccttctgccccagagaaacactccagagactgctacaaggaggaagaacacctcactcagtcaatcgtcccaccccctaaaccagagaggagtcatagcctcaaactccatcatacccagaacgtggagagggaccccagtgtgctgtaccagtaccaaccacacggcaagcgccagagcagtgtgactgttgtgtcccagtatgataacctggaagattaccactccctgcctcagcaccagcgaggagtctttggagggggcggcatggggacgtatgtgccccctggctttccccatccacagagcaggacctatgctacagcgttgggtcaaggggccttcctgcccgcagagttgtccttgcagcatcctgaaacacagatccatgcagaatga

SEQ ID NO: 54 - protein, 1738 aa, Homo sapiens
  Amino acid sequence of Grit
MKSRPTKQKLKQRGILKERVFGCDLGEHLLNSGFEVPQVLQSCTAFIERYGIVDGIYRLSGVASNIQRLRHEFDSEHVPDLTKEPYVQDIHSVGSLCKLYFRELPNPLLTYQLYEKFSDAVSAATDEERLIKIHDVIQQLPPPHYRTLEFLMRHLSLLADYCSITNMHAKNLAIVWAPNLLRSKQIESACFSGTAAFMEVRIQSVVVEFILNHVDVLFSGRISMAMQEGAASLSRPKSLLVSSPSTKLLTLEEAQARTQAQVNSPIVTENKYIEVGEGPAALQGKFHTIIEFPLERKRPQNKMKKSPVGSWRSFFNLGKSSSVSKRKLQRNESEPSEMKAMALKGGRAEGTLRSAKSEESLTSLHAVDGDSKLFRPRRPRSSSDALSASFNGEMLGNRCNSYDNLPHDNESEEEGGLLHIPALMSPHSAEDVDLSPPDIGVASLDFDPMSFQCSPPKAESECLESGASFLDSPGYSKDKPSANKKDAETGSSQCQTPGSTASSEPVSPLQEKLSPFFTLDLSPTEDKSSKPSSFTEKVVYAFSPKIGRKLSKSPSMSISEPISVTLPPRVSEVIGTVSNTTAQNASSSTWDKCVEERDATNRSPTQIVKMKTNETVAQEAYESEVQPLDQVAAEEVELPGKEDQSVSSSQSKAVASGQTQTGAVTHDPPQDSVPVSSVSLIPPPPPPKNVARMLALALAESAQQASTQSLKRPGTSQAGYTNYGDIAVATTEDNLSSSYSAVALDKAYFQTDRPAEQFHLQNNAPGNCDHPLPETTATGDPTHSNTTESGEQHHQVDLTGNQPHQAYLSGDPEKARITSVPLDSEKSDDHVSFPEDQSGKNSMPTVSFLDQDQSPPRFYSGDQPPSYLGASVDKLHHPLEFADKSPTPPNLPSDKIYPPSGSPEENTSTATMTYMTTTPATAQMSTKEASWDVAEQPTTADFAAATLQRTHRTNRPLPPPPSQRSAEQPPVVGQVQAATNIGLNNSHKVQGVVPVPERPPEPRAMDDPASAFISDSGAAAAQCPMATAVQPGLPEKVRDGARVPLLHLRAESVPAHPCGFPAPLPPTRMMESKMIAAIHSSSADATSSSNYHSFVTASSTSVDDALPLPLPVPQPKHASQKTVYSSFARPDVTTEPFGPDNCLHFNMTPNCQYRPQSVPPHHNKLEQHQVYGARSEPPASMGLRYNTYVAPGRNASGHHSKPCSRVEYVSSLSSSVRNTCYPEDIPPYPTIRRVQSLHAPPSSMIRSVPISRTEVPPDDEPAYCPRPLYQYKPYQSSQARSDYHVTQLQPYFENGRVHYRYSPYSSSSSSYYSPDGALCDVDAYGTVQLRPLHRLPNRDFAFYNPRLQGKSLYSYAGLAPRPRANVTGYFSPNDHNVVSMPPAADVKHTYTSWDLEDMEKYRMQSIRRESRARQKVKGPVMSQYDNMTPAVQDDLGGIYVIHLRSKSDPGKTGLLSVAEGKESRHAAKAISPEGEDRFYRRHPEAEMDRAHHHGGHGSTQPEKPSLPQKQSSLRSRKLPDMGCSLPEHRAHQEASHRQFCESKNGPPYPQGAGQLDYGSKGIPDTSEPVSYHNSGVKYAASGQESLRLNHKEVRLSKEMERPWVRQPSAPEKHSRDCYKEEEHLTQSIVPPPKPERSHSLKLHHTQNVERDPSVLYQYQPHGKRQSSVTVVSQYDNLEDYHSLPQHQRGVFGGGGMGTYVPPGFPHPQSRTYATALGQGAFLPAELSLQHPETQIHAE

SEQ ID NO: 55 - DNA, 954 bp, Homo sapiens
  Coding sequence for GNB2L1
atgactgagcagatgacccttcgtggcaccctcaagggccacaacggctgggtaacccagatcgctactaccccgcagttcccggacatgatcctctccgcctctcgagataagaccatcatcatgtggaaactgaccagggatgagaccaactatggaattccacagcgtgctctgcggggtcactcccactttgttagtgatgtggttatctcctcagatggccagtttgccctctcaggctcctgggatggaaccctgcgcctctgggatctcacaacgggcaccaccacgaggcgatttgtgggccataccaaggatgtgctgagtgtggccttctcctctgacaaccggcagattgtctctggatctcgagataaaaccatcaagctatggaataccctgggtgtgtgcaaatacactgtccaggatgagagccactcagagtgggtgtcttgtgtccgcttctcgcccaacagcagcaaccctatcatcgtctcctgtggctgggacaagctggtcaaggtatggaacctggctaactgcaagctgaagaccaaccacattggccacacaggctatctgaacacggtgactgtctctccagatggatccctctgtgcttctggaggcaaggatggccaggccatgttatgggatctcaacgaaggcaaacacctttacacgctagatggtggggacatcatcaacgccctgtgcttcagccctaaccgctactggctgtgtgctgccacaggccccagcatcaagatctgggatttagagggaaagatcattgtagatgaactgaagcaagaagttatcagtaccagcagcaaggcagaaccaccccagtgcacttccctggcctggtctgctgatggccagactctgtttgctggctacacggacaacctggtgcgagtgtggcaggtgaccattggcacacgctag

SEQ ID NO: 56 - protein, 317 aa, Homo sapiens [sequence omitted]

SEQ ID NO: 57 - DNA, 1002 bp, Homo sapiens
  Coding sequence for RGS19IP1
atgccgctgggactggggcggcggaaaaaggcgccccctctagtggaaaatgaggaggctgagccaggccgtggagggctgggcgtgggggagccagggcctctgggcggaggtgggtcggggggcccccaaatgggcttgcccccccctcccccagccctgcggccccgcctcgtgttccacacccagctggcccatggcagtcccactggccgcatcgagggcttcaccaacgtcaaggagctgtatggcaagatcgccgaggccttccgcctgccaactgccgaggtgatgttctgcaccctgaacacccacaaagtggacatggacaagctcctggggggccagatcgggctggaggacttcatcttcgcccacgtgaaggggcagcgcaaggaggtggaggtgttcaagtcggaggatgcactcgggctcaccatcacggacaacggggctggctacgccttcatcaagcgcatcaaggagggcagcgtgatcgaccacatccacctcatcagcgtgggcgacatgatcgaggccattaacgggcagagcctgctgggctgccggcactacgaggtggcccggctgctcaaggagctgccccgaggccgtaccttcacgctgaagctcacggagcctcgcaaggccttcgacatgatcagccagcgttcagcgggtggccgccctggctctggcccacaactgggcactggccgagggaccctgcggctccgatcccggggccccgccacggtggaggatctgccctctgcctttgaagagaaggccattgagaaggtggatgacctgctggagagttacatgggtatcagggacacggagctggcggccaccatggtggagctgggaaaggacaaaaggaacccggatgagctggccgaggccctggacgaacggctgggtgactttgccttccctgacgagttcgtctttgacgtctggggcgccattggggacgccaaggtcggccgctactag

SEQ ID NO: 58 - protein, 333 aa, Homo sapiens
  Amino acid sequence of Gipc
MPLGLGRRKKAPPLVENEEAEPGRGGLGVGEPGPLGGGGSGGPQMGLPPPPPALRPRLVFHTQLAHGSPTGRIEGFTNVKELYGKIAEAFRLPTAEVMFCTLNTHKVDMDKLLGGQIGLEDFIFAHVKGQRKEVEVFKSEDALGLTITDNGAGYAFIKRIKEGSVIDHIHLISVGDMIEAINGQSLLGCRHYEVARLLKELPRGRTFTLKLTEPRKAFDMISQRSAGGRPGSGPQLGTGRGTLRLRSRGPATVEDLPSAFEEKAIEKVDDLLESYMGIRDTELAATMVELGKDKRNPDELAEALDERLGDFAFPDEFVFDVWGAIGDAKVGRY

SEQ ID NO: 59 - DNA, 1104 bp, Homo sapiens
  Coding sequence for AHSG
atgaagtccctcgtcctgctcctttgtcttgctcagctctggggctgccactcagccccacatggcccagggctgatttatagacaaccgaactgcgatgatccagaaactgaggaagcagctctggtggctatagactacatcaatcaaaaccttccttggggatacaaacacaccttgaaccagattgatgaagtaaaggtgtggcctcagcagccctccggagagctgtttgagattgaaatagacaccctggaaaccacctgccatgtgctggaccccacccctgtggcaagatgcagcgtgaggcagctgaaggagcatgctgtcgaaggagactgtgatttccagctgttgaaactagatggcaagttttccgtggtatacgcaaaatgtgattccagtccagactcagccgaggacgtgcgcaaggtgtgccaagactgccccctgctggccccgctgaacgacaccagggtggtgcacgccgcgaaagctgccctggccgccttcaacgctcagaacaacggctccaattttcagctggaggaaatttcccgggctcagcttgtgcccctcccaccttctacctatgtggagtttacagtgtctggcactgactgtgttgctaaagaggccacagaggcagccaagtgtaacctgctggcagaaaagcaatatggcttttgtaaggcaacactcagtgagaagcttggtggggcagaggttgcagtgacctgcacggtgttccaaacacagcccgtgacctcacagccccaaccagaaggtgccaatgaagcagtccccacccccgtggtggacccagatgcacctccgtcccctccacttggcgcacctggactccctccagctggctcacccccagactcccatgtgttactggcagctcctccaggacaccagttgcaccgggcgcactacgacctgcgccacaccttcatgggtgtggtctcattggggtcaccctcaggagaagtgtcgcacccccggaaaacacgcacagtggtgcagcctagtgttggtgctgctgctgggccagtggttcctccatgtccggggaggatcagacacttcaaggtctag

SEQ ID NO: 60 - protein, 367 aa, Homo sapiens
  Amino acid sequence of Alpha2-HSG
MKSLVLLLCLAQLWGCHSAPHGPGLIYRQPNCDDPETEEAALVAIDYINQNLPWGYKHTLNQIDEVKVWPQQPSGELFEIEIDTLETTCHVLDPTPVARCSVRQLKEHAVEGDCDFQLLKLDGKFSVVYAKCDSSPDSAEDVRKVCQDCPLLAPLNDTRVVHAAKAALAAFNAQNNGSNFQLEEISRAQLVPLPPSTYVEFTVSGTDCVAKEATEAAKCNLLAEKQYGFCKATLSEKLGGAEVAVTCTVFQTQPVTSQPQPEGANEAVPTPVVDPDAPPSPPLGAPGLPPAGSPPDSHVLLAAPPGHQLHRAHYDLRHTFMGVVSLGSPSGEVSHPRKTRTVVQPSVGAAAGPVVPPCPGRIRHFKV

SEQ ID NO: 61 - DNA, 2337 bp, Homo sapiens
  Coding sequence for MAGED1
atggctcagaaaatggactgtggtgcgggcctcctcggcttccaggctgaggcctccgtagaagacagcgccttgcttatgcagaccttgatggaggccatccagatctcagaggctccacctactaaccaggccaccgcagctgctagtccccagagttcacagcccccaactgccaatgagatggctgacattcaggtttcagcagctgccgctaggcctaagtcagcctttaaagtccagaatgccaccacaaaaggcccaaatggtgtctatgatttctctcaggctcataatgccaaggatgtgcccaacacgcagcccaaggcagcctttaagtcccaaaatgctaccccaaagggtccaaatgctgcctatgatttttcccaggcagcaaccactggtgagttagctgctaacaagtctgagatggccttcaaggcccagaatgccactactaaagtgggcccaaatgccacctacaatttctctcagtctctcaatgccaatgacctggccaacagcaggcctaagacccctttcaaggcttggaatgataccactaaggccccaacagctgatacccagacccagaatgtaaatcaggccaaaatggccacttcccaggctgacatagagaccgacccaggtatctctgaacctgacggtgcaactgcacagacatcagcagatggttcccaggctcagaatctggagtcccggacaataattcggggcaagaggacccgcaagattaataacttgaatgttgaagagaacagcagtggggatcagaggcgggccccactggctgcagggacctggaggtctgcaccagttccagtgaccactcagaacccacctggcgcaccccccaatgtgctctggcagacgccattggcttggcagaacccctcaggctggcaaaaccagacagccaggcagaccccaccagcacgtcagagccctccagctaggcagaccccaccagcctggcagaacccagtcgcttggcagaacccagtgatttggccaaacccagtaatctggcagaacccagtgatctggccaaaccccattgtctggcccggccctgttgtctggccgaatccactggcctggcagaatccacctggatggcagactccacctggatggcagaccccaccgggctggcagggtcctccagactggcaaggtcctcctgactggccgctaccacccgactggccactgccacctgattggccacttcccactgactggccactaccacctgactggatccccgctgattggccaattccacctgactggcagaacctgcgcccctcgcctaacctgcgcccttctcccaactcgcgtgcctcacagaacccaggtgctgcacagccccgagatgtggcccttcttcaggaaagagcaaataagttggtcaagtacttgatgcttaaggactacacaaaggtgcccatcaagcgctcagaaatgctgagagatatcatccgtgaatacactgatgtttatccagaaatcattgaacgtgcatgctttgtcctagagaagaaatttgggattcaactgaaagaaattgacaaagaagaacacctgtatattctcatcagtacccccgagtccctggctggcatactgggaacgaccaaagacacacccaagctcggtctcctcttggtgattctgggtgtcatcttcatgaatggcaaccgtgccagtgaggctgtcctctgggaggcactacgcaagatgggactgcgtcctggggtgagacatcccctccttggagatctaaggaaacttctcacctatgagtttgtaaagcagaaatacctggactacagacgagtgcccaacagcaaccccccggagtatgagttcctctggggcctccgttcctaccatgagactagcaagatgaaagtgctgagattcattgcagaggttcagaaaagagaccctcgtgactggactgcacagttcatggaggctgcagatgaggccttggatgctctggatgctgctgcagctgaggccgaagcccgggctgaagcaagaacccgcatgggaattggagatgaggctgtgtctgggccctggagctgggatgacattgagtttgagctgctgacctgggatgaggaaggagattttggagatccctggtccagaattccatttaccttctgggccagataccaccagaatgcccgctccagattccctcagacctttgccggtcccattattggtcctggtggtacagccagtgccaacttcgctgccaactttggtgccattggtttcttctgggttgagtga

SEQ ID NO: 62 - protein, 778 aa, Homo sapiens
  Amino acid sequence of NRAGE
MAQKMDCGAGLLGFQAEASVEDSALLMQTLMEAIQISEAPPTNQATAAASPQSSQPPTANEMADIQVSAAAARPKSAFKVQNATTKGPNGVYDFSQAHNAKDVPNTQPKAAFKSQNATPKGPNAAYDFSQAATTGELAANKSEMAFKAQNATTKVGPNATYNFSQSLNANDLANSRPKTPFKAWNDTTKAPTADTQTQNVNQAKMATSQADIETDPGISEPDGATAQTSADGSQAQNLESRTIIRGKRTRKINNLNVEENSSGDQRRAPLAAGTWRSAPVPVTTQNPPGAPPNVLWQTPLAWQNPSGWQNQTARQTPPARQSPPARQTPPAWQNPVAWQNPVIWPNPVIWQNPVIWPNPIVWPGPVVWPNPLAWQNPPGWQTPPGWQTPPGWQGPPDWQGPPDWPLPPDWPLPPDWPLPTDWPLPPDWIPADWPIPPDWQNLRPSPNLRPSPNSRASQNPGAAQPRDVALLQERANKLVKYLMLKDYTKVPIKRSEMLRDIIREYTDVYPEIIERACFVLEKKFGIQLKEIDKEEHLYILISTPESLAGILGTTKDTPKLGLLLVILGVIFMNGNRASEAVLWEALRKMGLRPGVRHPLLGDLRKLLTYEFVKQKYLDYRRVPNSNPPEYEFLWGLRSYHETSKMKVLRFIAEVQKRDPRDWTAQFMEAADEALDALDAAAAEAEARAEARTRMGIGDEAVSGPWSWDDIEFELLTWDEEGDFGDPWSRIPFTFWARYHQNARSRFPQTFAGPIIGPGGTASANFAANFGAIGFFWVE

SEQ ID NO: 63 - DNA, 1104 bp, Homo sapiens; identical to SEQ ID NO: 59
  Coding sequence for ABL1

SEQ ID NO: 64 - protein, 367 aa, Homo sapiens; identical to SEQ ID NO: 60
  Amino acid sequence of c-abl

SEQ ID NO: 65 - DNA, 3909 bp, Homo sapiens
  Coding sequence for ERBB2IP
atgactacaaaacgaagtttgtttgtgcggttggtaccatgtcgctgtctacgaggggaagaggagactgtcactactcttgattattctcattgcagcttagaacaagttccgaaagagatttttacttttgaaaaaaccttggaggaactctatttagatgctaatcagattgaagagcttccaaagcaactttttaactgtcagtctttacacaaactgagtttgccagacaatgatttaacaacgttaccagcatccattgcaaaccttattaatctcagggaactggatgtcagcaagaatggaatacaggagtttccagaaaatataaaaaattgtaaagttttgacaattgtggaggccagtgtaaaccctatttccaagctccctgatggattttctcagctgttaaacctaacccagttgtatctgaatgatgcttttcttgagttcttgccagcaaattttggcagattaactaaactccaaatattagagcttagagaaaaccagttaaaaatgttgcctaaaactatgaatagactgacccagctggaaagattggatttgggaagtaacgaattcacggaagtgcctgaagtacttgagcaactaagtggattgaaagagttttggatggatgctaatagactgacttttattccagggtttattggtagtttgaaacagctcacatatttggatgtttctaaaaataatattgaaatggttgaagaaggaatttcaacatgtgaaaaccttcaagacctcctattatcaagcaattcacttcagcagcttcctgagactattggttcgttgaagaatataacaacgcttaaaatagatgaaaaccagttaatgtatctgccagactctataggagggttaatatcagtagaagaactggattgtagtttcaatgaagttgaagctttgccttcatctattgggcagcttactaacttaagaacttttgctgctgatcataattacttacagcagttgcccccagagattggaagctggaaaaatataactgtgctgtttctccattccaataaacttgagacacttccagaggaaatgggtgatatgcaaaaattaaaagtcattaatttaagtgataatagattaaagaatttaccctttagctttacaaagctacagcaattgacagctatgtggctctcagataatcagtccaaacccctgatacctcttcaaaaagaaactgattcagagacccagaaaatggtgcttaccaactacatgttccctcaacagccaaggactgaggatgttatgtttatatcagataatgaaagttttaacccttcattgtgggaggaacagaggaaacagcgggctcaagttgcatttgaatgtgatgaagacaaagatgaaagggaggcacctcccagggagggaaatttaaaaagatatccaacaccatacccagatgagcttaagaatatggtcaaaactgttcaaaccattgtacatagattaaaagatgaagagaccaatgaagactcaggaagagatttgaaaccacatgaagatcaacaagatataaataaagatgtgggtgtgaagacctcagaaagtactactacagtaaaaagcaaagttgatgaaagagaaaaatatatgataggaaactctgtacagaagatcagtgaacctgaagctgagattagtcctgggagtttaccagtgactgcaaatatgaaagcctctgagaacttgaagcatattgttaaccatgatgatgtttttgaggaatctgaagaactttcttctgatgaagagatgaaaatggcggagatgcgaccaccattaattgaaacctctattaaccagccaaaagtcgtagcacttagtaataacaaaaaagatgatacaaaggaaacagattctttatcagatgaagttacacacaatagcaatcagaataacagcaattgttcttctccatctcggatgtctgattcagtttctcttaatactgatagtagtcaagacacctcactctgctctccagtgaaacaaactcatattgatattaattccaaaatcaggcaagaagatgaaaattttaacagccttttacaaaatggagatattttaaacagttcaacagaggaaaagttcaaagctcatgataaaaaagattttaacttacctgaatatgatttgaatgttgaagagcgattagttctaattgagaaaagtgttgactcaacagccacagctgatgacactcacaaattagatcatatcaatatgaatcttaataaacttataactaatgatacatttcaaccagagatcatggaaagatcaaaaacacaggatattgtgcttggaacaagctttttaagcattaattctaaagaggaaactgagcacttggaaaatggaaacaagtatcctaatttggaatccgtaaataaggtaaatggacattctgaggaaacttcccagtctcctaataggactgaaccacatgacagtgattgttctgttgacttaggtatttccaaaagcactgaagatctctcccctcagaaaagtggtccagttggatctgttgtgaaatctcatagcataactaatatggagattggagggctaaaaatctatgatattcttagtgataatggacctcagcagccaagtacaaccgttaaaatcacatctgctgttgatggaaaaaatatagtcaggagcaagtctgccacactgttgtatgatcaaccattgcaggtatttactggttcttcctcatcttctgatttaatatcaggaacaaaggcaattttcaagtttgattcaaatcataatcccgaagagccaaatataataagaggccccacaagtggcccacaatctgcacctcaaatatatggtcctccacagtataatatccaatacagtagcagtgctgcagtcaaagacactttgtggcactccaaacaaaatccccaaatagaccatgccagttttcctcctcagctccttcctagatcagagagcacagaaaatcaaagttatgctaaacattctgccaatatgaatttctctaatcataacaatgttcgagctaatactgcataccatttacatcagagacttggcccagcaagacatggggaaatgtgggccatctcaccaaacgaccgacttattcctgcagtaactcgaagtacaatccagcgacaaagtagtgtgtcctccacagcctctgtaaatcttggtgatccaggctctacaaggcgggctcagattcctgaaggagattatttatcatacagagagttccactcagcgggaagaactcctccaatgatgccaggatcacagagacccctttctgcacgaacatacagcatagatggtccaaatgcatcaagacctcagagtgctcgaccctctattaatgaaataccagagagaactatgtcagttagtgatttcaattattcacggactagtccttcaaaaagaccaaatgcaagggttggttctgagcattctttattagatcctccaggaaaaagtaaagttcctcgtgactggagagaacaagtacttcgacatattgaagccaaaaagttagaaaagattcgagtgagggttgaaaaggatccagaacttggatttagcatatcaggtggtgtcgggggtagaggaaacccattcagacctgatgatgatggtatatttgtaacaagggtacaacctgaaggaccagcatcaaaattactgcagccaggtgataaaattattcaggctaatggctacagttttataaatattgaacatggacaagcagtgtccttgctaaaaactttccagaatacagttgaactcatcattgtacgagaagtttcctcataa

SEQ ID NO: 66 - protein, 1302 aa, Homo sapiens
  Amino acid sequence of Erbin
MTTKRSLFVRLVPCRCLRGEEETVTTLDYSHCSLEQVPKEIFTFEKTLEELYLDANQIEELPKQLFNCQSLHKLSLPDNDLTTLPASIANLINLRELDVSKNGIQEFPENIKNCKVLTIVEASVNPISKLPDGFSQLLNLTQLYLNDAFLEFLPANFGRLTKLQILELRENQLKMLPKTMNRLTQLERLDLGSNEFTEVPEVLEQLSGLKEFWMDANRLTFIPGFIGSLKQLTYLDVSKNNIEMVEEGISTCENLQDLLLSSNSLQQLPETIGSLKNITTLKIDENQLMYLPDSIGGLISVEELDCSFNEVEALPSSIGQLTNLRTFAADHNYLQQLPPEIGSWKNITVLFLHSNKLETLPEEMGDMQKLKVINLSDNRLKNLPFSFTKLQQLTAMWLSDNQSKPLIPLQKETDSETQKMVLTNYMFPQQPRTEDVMFISDNESFNPSLWEEQRKQRAQVAFECDEDKDEREAPPREGNLKRYPTPYPDELKNMVKTVQTIVHRLKDEETNEDSGRDLKPHEDQQDINKDVGVKTSESTTTVKSKVDEREKYMIGNSVQKISEPEAEISPGSLPVTANMKASENLKHIVNHDDVFEESEELSSDEEMKMAEMRPPLIETSINQPKVVALSNNKKDDTKETDSLSDEVTHNSNQNNSNCSSPSRMSDSVSLNTDSSQDTSLCSPVKQTHIDINSKIRQEDENFNSLLQNGDILNSSTEEKFKAHDKKDFNLPEYDLNVEERLVLIEKSVDSTATADDTHKLDHINMNLNKLITNDTFQPEIMERSKTQDIVLGTSFLSINSKEETEHLENGNKYPNLESVNKVNGHSEETSQSPNRTEPHDSDCSVDLGISKSTEDLSPQKSGPVGSVVKSHSITNMEIGGLKIYDILSDNGPQQPSTTVKITSAVDGKNIVRSKSATLLYDQPLQVFTGSSSSSDLISGTKAIFKFDSNHNPEEPNIIRGPTSGPQSAPQIYGPPQYNIQYSSSAAVKDTLWHSKQNPQIDHASFPPQLLPRSESTENQSYAKHSANMNFSNHNNVRANTAYHLHQRLGPARHGEMWAISPNDRLIPAVTRSTIQRQSSVSSTASVNLGDPGSTRRAQIPEGDYLSYREFHSAGRTPPMMPGSQRPLSARTYSIDGPNASRPQSARPSINEIPERTMSVSDFNYSRTSPSKRPNARVGSEHSLLDPPGKSKVPRDWREQVLRHIEAKKLEKIRVRVEKDPELGFSISGGVGGRGNPFRPDDDGIFVTRVQPEGPASKLLQPGDKIIQANGYSFINIEHGQAVSLLKTFQNTVELIIVREVSS

SEQ ID NO: 67 - DNA, 2304 bp, Homo sapiens
  Coding sequence for DLG4
atgtcccagagaccaagagctcccaggtcagccctctggctcctggcacccccactgctgcggtgggcacccccactcctcacagtgctgcatagcgacctcttccaggccttgctggacatcctggactattatgaggcttccctctcagagagtcagaaataccgctaccaagatgaagacacgccccctctggagcacagcccggcccacctccccaaccaggccaattctcccccagtgattgtcaacacagataccctagaagccccaggatatgagttgcaggtgaacgggaccgagggggagatggaatacgaggaaatcacattggaaaggggtaactcaggtctgggcttcagcatcgcaggtggcactgacaacccacacatcggtgacgacccatccattttcatcaccaagatcattcctggtggggctgcggcccaggatggccgcctcagggtcaacgacagcatcctgtttgtaaatgaagtggacgtgcgcgaggtgacccactcagcggcggtggaagccctcaaagaggcaggctccatcgttcgcctctatgtcatgcgccggaagcccccggctgagaaggtcatggagatcaagctcatcaaggggcctaaaggtcttggcttcagcatcgcagggggcgtagggaaccagcacatcccaggagataatagcatctatgtaacaaagatcatcgaagggggtgctgcccacaaggatgggaggttgcagattggagacaagatcctggcggtcaacagtgtggggctagaggacgtcatgcatgaagatgctgtggcagccctgaagaacacgtatgatgttgtctacctaaaggtggccaagcccagcaatgcctacctgagtgacagctatgctcccccagacatcacaacctcttattcccagcacctggacaatgagatcagtcacagcagctacctgggcaccgactaccccacagccatgacccccacttcccctcggcgctactctccagtggccaaggacctgctcggggaggaagacattccccgagaaccgaggcgaattgtgatccaccggggctccacgggcctgggcttcaacatcgtgggtggcgaggacggtgaaggcatcttcatctcctttatcctggccgggggccctgcagacctcagtggggagctgcggaagggggaccagatcctgtcggtcaacggtgtggacctccgaaatgccagccatgagcaggctgccattgccctgaagaatgcgggtcagacggtcacgatcatcgctcagtataaaccagaagagtacagccgattcgaggccaagatccacgaccttcgggaacagctcatgaacagcagcctgggctcagggactgcgtccttgcggagcaaccccaaaaggggtttctacatcagggccctgtttgattacgacaagaccaaggactgcggcttcctgagccaggccctgagcttccgctttggggatgtgctgcatgtcatcgatgctagtgatgaggagtggtggcaggcacggcgggtccactctgacagtgagaccgacgacattgggttcatccccagcaaacggcgggttgagcgacgagagtggtcaaggttaaaggccaaggactggggctccagctctggatcgcagggtcgagaagactcggttctgagctacgagacagtgacgcagatggaagtgcactatgctcgccccatcatcatccttgggcccaccaaggaccgcgccaacgatgatcttctctccgagttccccgacaagtttggatcctgtgttccccatacgacacggcccaagcgggagtatgagatagatggccgggattaccactttgtgtcgtcccgggagaaaatggagaaggacattcaggcgcacaagttcattgaggccggccagtacaacagccacctctatgggaccagcgtccagtccgtgcgagaggtggcagagcaggggaagcactgcatcctcgatgtctcggccaatgccgtgcggcggctgcaggcggcccacctgcaccccatcgccatcttcatccgcccccgctccctggagaatgtgctagagattaacaagcggatcacagaggagcaagcccgcaaagccttcgacagagccaccaagctggagcaggagttcacagagtgcttctcagccatcgtggagggtgacagctttgaggagatctaccacaaggtgaagcgtgtcatcgaggacctctcaggcccctacatctgggttccagcccgagagagactctga

SEQ ID NO: 68 - protein, 767 aa, Homo sapiens
  Amino acid sequence of PSD95
MSQRPRAPRSALWLLAPPLLRWAPPLLTVLHSDLFQALLDILDYYEASLSESQKYRYQDEDTPPLEHSPAHLPNQANSPPVIVNTDTLEAPGYELQVNGTEGEMEYEEITLERGNSGLGFSIAGGTDNPHIGDDPSIFITKIIPGGAAAQDGRLRVNDSILFVNEVDVREVTHSAAVEALKEAGSIVRLYVMRRKPPAEKVMEIKLIKGPKGLGFSIAGGVGNQHIPGDNSIYVTKIIEGGAAHKDGRLQIGDKILAVNSVGLEDVMHEDAVAALKNTYDVVYLKVAKPSNAYLSDSYAPPDITTSYSQHLDNEISHSSYLGTDYPTAMTPTSPRRYSPVAKDLLGEEDIPREPRRIVIHRGSTGLGFNIVGGEDGEGIFISFILAGGPADLSGELRKGDQILSVNGVDLRNASHEQAAIALKNAGQTVTIIAQYKPEEYSRFEAKIHDLREQLMNSSLGSGTASLRSNPKRGFYIRALFDYDKTKDCGFLSQALSFRFGDVLHVIDASDEEWWQARRVHSDSETDDIGFIPSKRRVERREWSRLKAKDWGSSSGSQGREDSVLSYETVTQMEVHYARPIIILGPTKDRANDDLLSEFPDKFGSCVPHTTRPKREYEIDGRDYHFVSSREKMEKDIQAHKFIEAGQYNSHLYGTSVQSVREVAEQGKHCILDVSANAVRRLQAAHLHPIAIFIRPRSLENVLEINKRITEEQARKAFDRATKLEQEFTECFSAIVEGDSFEEIYHKVKRVIEDLSGPYIWVPARERL

SEQ ID NO: 69 - DNA, 2622 bp, Homo sapiens
  Coding sequence for ENPP1
atggacgtgggggaggagccgctggagaaggcggcgcgcgcccgcactgccaaggaccccaacacctataaagtactctcgctggtattgtcagtatgtgtgttaacaacaatacttggttgtatatttgggttgaaaccaagctgtgccaaagaagttaaaagttgcaaaggtcgctgtttcgagagaacatttgggaactgtcgctgtgatgctgcctgtgttgagcttggaaactgctgtttagattaccaggagacgtgcatagaaccagaacatatatggacttgcaacaaattcaggtgtggtgagaaaaggttgaccagaagcctctgtgcctgttcagatgactgcaaggacaagggcgactgctgcatcaactacagttctgtgtgtcaaggtgagaaaagttgggtagaagaaccatgtgagagcattaatgagccacagtgcccagcagggtttgaaacgcctcctaccctcttattttctttggatggattcagggcagaatatttacacacttggggtggacttcttcctgttattagcaaactaaaaaaatgtggaacatatactaaaaacatgagaccggtatatccaacaaaaactttccccaatcactacagcattgtcaccggattgtatccagaatctcatggcataatcgacaataaaatgtatgatcccaaaatgaatgcttccttttcacttaaaagtaaagagaaatttaatcctgagtggtacaaaggagaaccaatttgggtcacagctaagtatcaaggcctcaagtctggcacatttttctggccaggatcagatgtggaaattaacggaattttcccagacatctataaaatgtataatggttcagtaccatttgaagaaaggattttagctgttcttcagtggctacagcttcctaaagatgaaagaccacacttttacactctgtatttagaagaaccagattcttcaggtcattcatatggaccagtcagcagtgaagtcatcaaagccttgcagagggttgatggtatggttggtatgctgatggatggtctgaaagagctgaacttgcacagatgcctgaacctcatccttatttcagatcatggcatggaacaaggcagttgtaagaaatacatatatctgaataaatatttgggggatgttaaaaatattaaagttatctatggacctgcagctcgattgagaccctctgatgtcccagataaatactattcatttaactatgaaggcattgcccgaaatctttcttgccgggaaccaaaccagcacttcaaaccttacctgaaacatttcttacctaagcgtttgcactttgctaagagtgatagaattgagcccttgacattctatttggaccctcagtggcaacttgcattgaatccctcagaaaggaaatattgtggaagtggatttcatggctctgacaatgtattttcaaatatgcaagccctctttgttggctatggacctggattcaagcatggcattgaggctgacacctttgaaaacattgaagtctataacttaatgtgtgatttactgaatttgacaccggctcctaataacggaactcatggaagtcttaaccaccttctaaagaatcctgtttatacgccaaagcatcccaaagaagtgcaccccctggtacagtgccccttcacaagaaaccccagagataaccttggctgctcatgtaacccttcgattttgccgattgaggattttcaaacacagttcaatctgactgtggcagaagagaagattattaagcatgaaactttaccctatggaagacctagagttctccagaaggaaaacaccatctgtcttctttcccagcaccagtttatgagtggatacagccaagacatcttaatgcccctttggacatcctataccgtggacagaaatgacagtttctctacggaagacttctccaactgtctgtaccaggactttagaattcctcttagtcctgtccataaatgttcattttataaaaataacaccaaagtgagttacgggttcctctccccaccacaactaaataaaaattcaagtggaatatattctgaagctttgcttactacaaatatagtgccaatgtaccagagttttcaagttatatggcgctactttcatgacaccctactgcgaaagtatgctgaagaaagaaatggtgtcaatgtcgtcagtggtcctgtgtttgactttgattatgatggacgttgtgattccttagagaatctgaggcaaaaaagaagagtcatccgtaaccaagaaattttgattccaactcacttctttattgtgctaacaagctgtaaagatacatctcagacgcctttgcactgtgaaaacctagacaccttagctttcattttgcctcacaggactgataacagcgagagctgtgtgcatgggaagcatgactcctcatgggttgaagaattgttaatgttacacagagcacggatcacagatgttgagcacatcactggactcagcttctatcaacaaagaaaagagccagtttcagacattttaaagttgaaaacacatttgccaacctttagccaagaagactga

SEQ ID NO: 70 - protein, 873 aa, Homo sapiens
  Amino acid sequence of PC-1
MDVGEEPLEKAARARTAKDPNTYKVLSLVLSVCVLTTILGCIFGLKPSCAKEVKSCKGRCFERTFGNCRCDAACVELGNCCLDYQETCIEPEHIWTCNKFRCGEKRLTRSLCACSDDCKDKGDCCINYSSVCQGEKSWVEEPCESINEPQCPAGFETPPTLLFSLDGFRAEYLHTWGGLLPVISKLKKCGTYTKNMRPVYPTKTFPNHYSIVTGLYPESHGIIDNKMYDPKMNASFSLKSKEKFNPEWYKGEPIWVTAKYQGLKSGTFFWPGSDVEINGIFPDIYKMYNGSVPFEERILAVLQWLQLPKDERPHFYTLYLEEPDSSGHSYGPVSSEVIKALQRVDGMVGMLMDGLKELNLHRCLNLILISDHGMEQGSCKKYIYLNKYLGDVKNIKVIYGPAARLRPSDVPDKYYSFNYEGIARNLSCREPNQHFKPYLKHFLPKRLHFAKSDRIEPLTFYLDPQWQLALNPSERKYCGSGFHGSDNVFSNMQALFVGYGPGFKHGIEADTFENIEVYNLMCDLLNLTPAPNNGTHGSLNHLLKNPVYTPKHPKEVHPLVQCPFTRNPRDNLGCSCNPSILPIEDFQTQFNLTVAEEKIIKHETLPYGRPRVLQKENTICLLSQHQFMSGYSQDILMPLWTSYTVDRNDSFSTEDFSNCLYQDFRIPLSPVHKCSFYKNNTKVSYGFLSPPQLNKNSSGIYSEALLTTNIVPMYQSFQVIWRYFHDTLLRKYAEERNGVNVVSGPVFDFDYDGRCDSLENLRQKRRVIRNQEILIPTHFFIVLTSCKDTSQTPLHCENLDTLAFILPHRTDNSESCVHGKHDSSWVEELLMLHRARITDVEHITGLSFYQQRKEPVSDILKLKTHLPTFSQED

SEQ ID NO: 71 - DNA, 1491 bp, Homo sapiens
  Coding sequence for FLJ14768
atggatgacgtccccgccccaacccctgcaccagcaccgcccgccgctgccgcccccagggtcccgtttcactgcagtgaatgtggcaagagcttccgctaccgctcagacctgcggcgccactttgcccggcacacagcgctcaagccccacgcatgtccgcgctgcggcaagggtttcaagcacagcttcaacctagccaaccacctgcgctcgcacaccggggagcggccctaccgctgctctgcctgccccaaggggttccgcgactccaccggcctgctgcaccaccaggtcgtccacactggtgagaaaccctactgctgcctggtctgcgagctccgcttctcctcacgctccagcctgggccgccacctcaggcgccagcaccgtggggttctcccctctcccctgcagcccggccctggcctgcccgccttgagtgcgccctgctccgtctgctgcaatgtggggccctgctcggtgtgcgggggctcaggggccggcggcggagagggccccgagggggcaggcgcgggtctgggcagctgggggctggcagaggcggcagctgcggccgcggcctccttgcccccatttgcgtgcggcgcctgcgcgcggcgcttcgaccacggccgcgagctggcggcccactgggcggcgcacaccgacgtgaagcccttcaagtgcccgcgctgcgagcgcgacttcaacgcgcccgcgctgctggagcggcacaagctgacccacgacctgcagggcccgggcgcgcccccagcgcaagcctgggccgcggggccaggcgcagggcccgagacggcgggcgaaggcaccgctgcggaggcgggcgacgctcctctggcttcggaccgcaggctgctcctgggccccgcggggggcggcgtgcccaagctcggggggctgctccccgagggcggtggggaggcgcctgcacctgcggcggccgccgagccctcggaagacaccctgtaccagtgcgactgcgggaccttctttgcgtcggccgcggccctggccagtcacctggaggcccactcgggcccggccacctacggctgcggccactgcggggctctgtacgcggcgctggccgccttggaggagcaccggcgggtcagccacggtgagggcggcggggaggaggcggcggccgccgcccgggaaagggaaccggcgtccggggaacccccgtctggctccggccgcggcaagaagatcttcggctgctccgagtgcgagaagctgttccgctcaccgcgagacctggagcggcacgtgctggtgcacactggcgagaagccgttcccgtgcctggagtgcggcaagttcttccgccacgagtgctacctcaagcgccaccggctgctgcacggcaccgagcggcccttcccttgccacatctgcggcaagggcttcatcacgctcagcaacctctccaggcacctgaagctgcaccggggcatggactga

SEQ ID NO: 72 - protein, 496 aa, Homo sapiens
  Amino acid sequence of Fiz1
MDDVPAPTPAPAPPAAAAPRVPFHCSECGKSFRYRSDLRRHFARHTALKPHACPRCGKGFKHSFNLANHLRSHTGERPYRCSACPKGFRDSTGLLHHQVVHTGEKPYCCLVCELRFSSRSSLGRHLRRQHRGVLPSPLQPGPGLPALSAPCSVCCNVGPCSVCGGSGAGGGEGPEGAGAGLGSWGLAEAAAAAAASLPPFACGACARRFDHGRELAAHWAAHTDVKPFKCPRCERDFNAPALLERHKLTHDLQGPGAPPAQAWAAGPGAGPETAGEGTAAEAGDAPLASDRRLLLGPAGGGVPKLGGLLPEGGGEAPAPAAAAEPSEDTLYQCDCGTFFASAAALASHLEAHSGPATYGCGHCGALYAALAALEEHRRVSHGEGGGEEAAAAAREREPASGEPPSGSGRGKKIFGCSECEKLFRSPRDLERHVLVHTGEKPFPCLECGKFFRHECYLKRHRLLHGTERPFPCHICGKGFITLSNLSRHLKLHRGMD

SEQ ID NO: 73 - DNA, 612 bp, Homo sapiens
  Coding sequence for RPL13A
atggcggaggtgcaggtcctggtgcttgatggtcgaggccatctcctgggccgcctggcggccatcgtggctaaacaggtactgctgggccggaaggtggtggtcgtacgctgtgaaggcatcaacatttctggcaatttctacagaaacaagttgaagtacctggctttcctccgcaagcggatgaacaccaacccttcccgaggcccctaccacttccgggcccccagccgcatcttctggcggaccgtgcgaggtatgctgccccacaaaaccaagcgaggccaggccgctctggaccgtctcaaggtgtttgacggcatcccaccgccctacgacaagaaaaagcggatggtggttcctgctgccctcaaggtcgtgcgtctgaagcctacaagaaagtttgcctatctggggcgcctggctcacgaggttggctggaagtaccaggcagtgacagccaccctggaggagaagaggaaagagaaagccaagatccactaccggaagaagaaacagctcatgaggctacggaaacaggccgagaagaacgtggagaagaaaattgacaaatacacagaggtcctcaagacccacggactcctggtctga

SEQ ID NO: 74 - protein, 203 aa, Homo sapiens [sequence omitted]

SEQ ID NO: 75 - DNA, 537 bp, Homo sapiens
  Coding sequence for CAV1
atgtctgggggcaaatacgtagactcggagggacatctctacaccgttcccatccgggaacagggcaacatctacaagcccaacaacaaggccatggcagacgagctgagcgagaagcaagtgtacgacgcgcacaccaaggagatcgacctggtcaaccgcgaccctaaacacctcaacgatgacgtggtcaagattgactttgaagatgtgattgcagaaccagaagggacacacagttttgacggcatttggaaggccagcttcaccaccttcactgtgacgaaatactggttttaccgcttgctgtctgccctctttggcatcccgatggcactcatctggggcatttacttcgccattctctctttcctgcacatctgggcagttgtaccatgcattaagagcttcctgattgagattcagtgcatcagccgtgtctattccatctacgtccacaccgtctgtgacccactctttgaagctgttgggaaaatattcagcaatgtccgcatcaacttgcagaaagaaatataa

SEQ ID NO: 76 - protein, 178 aa, Homo sapiens
  Amino acid sequence of caveolin
MSGGKYVDSEGHLYTVPIREQGNIYKPNNKAMADELSEKQVYDAHTKEIDLVNRDPKHLNDDVVKIDFEDVIAEPEGTHSFDGIWKASFTTFTVTKYWFYRLLSALFGIPMALIWGIYFAILSFLHIWAVVPCIKSFLIEIQCISRVYSIYVHTVCDPLFEAVGKIFSNVRINLQKEI

SEQ ID NO: 77 - DNA, 1353 bp, Homo sapiens
  Coding sequence for CSK
atgtcagcaatacaggccgcctggccatccggtacagaatgtattgccaagtacaacttccacggcactgccgagcaggacctgcccttctgcaaaggagacgtgctcaccattgtggccgtcaccaaggaccccaactggtacaaagccaaaaacaaggtgggccgtgagggcatcatcccagccaactacgtccagaagcgggagggcgtgaaggcgggtaccaaactcagcctcatgccttggttccacggcaagatcacacgggagcaggctgagcggcttctgtacccgccggagacaggcctgttcctggtgcgggagagcaccaactaccccggagactacacgctgtgcgtgagctgcgacggcaaggtggagcactaccgcatcatgtaccatgccagcaagctcagcatcgacgaggaggtgtactttgagaacctcatgcagctggtggagcactacacctcagacgcagatggactctgtacgcgcctcattaaaccaaaggtcatggagggcacagtggcggcccaggatgagttctaccgcagcggctgggccctgaacatgaaggagctgaagctgctgcagaccatcgggaagggggagttcggagacgtgatgctgggcgattaccgagggaacaaagtcgccgtcaagtgcattaagaacgacgccactgcccaggccttcctggctgaagcctcagtcatgacgcaactgcggcatagcaacctggtgcagctcctgggcgtgatcgtggaggagaagggcgggctctacatcgtcactgagtacatggccaaggggagccttgtggactacctgcggtctaggggtcggtcagtgctgggcggagactgtctcctcaagttctcgctagatgtctgcgaggccatggaatacctggagggcaacaatttcgtgcatcgagacctggctgcccgcaatgtgctggtgtctgaggacaacgtggccaaggtcagcgactttggtctcaccaaggaggcgtccagcacccaggacacgggcaagctgccagtcaagtggacagcccctgaggccctgagagagaagaaattctccactaagtctgacgtgtggagtttcggaatccttctctgggaaatctactcctttgggcgagtgccttatccaagaattcccctgaaggacgtcgtccctcgggtggagaagggctacaagatggatgcccccgacggctgcccgcccgcagtctatgaagtcatgaagaactgctggcacctggacgccgccatgcggccctccttcctacagctccgagagcagcttgagcacatcaaaacccacgagctgcacctgtga

SEQ ID NO: 78 - protein, 450 aa, Homo sapiens
  Amino acid sequence of c-src
MSAIQAAWPSGTECIAKYNFHGTAEQDLPFCKGDVLTIVAVTKDPNWYKAKNKVGREGIIPANYVQKREGVKAGTKLSLMPWFHGKITREQAERLLYPPETGLFLVRESTNYPGDYTLCVSCDGKVEHYRIMYHASKLSIDEEVYFENLMQLVEHYTSDADGLCTRLIKPKVMEGTVAAQDEFYRSGWALNMKELKLLQTIGKGEFGDVMLGDYRGNKVAVKCIKNDATAQAFLAEASVMTQLRHSNLVQLLGVIVEEKGGLYIVTEYMAKGSLVDYLRSRGRSVLGGDCLLKFSLDVCEAMEYLEGNNFVHRDLAARNVLVSEDNVAKVSDFGLTKEASSTQDTGKLPVKWTAPEALREKKFSTKSDVWSFGILLWEIYSFGRVPYPRIPLKDVVPRVEKGYKMDAPDGCPPAVYEVMKNCWHLDAAMRPSFLQLREQLEHIKTHELHL

SEQ ID NO: 79 - DNA, 3729 bp, Homo sapiens
  Coding sequence for IRS1
atggcgagccctccggagagcgatggcttctcggacgtgcgcaaggtgggctacctgcgcaaacccaagagcatgcacaaacgcttcttcgtactgcgcgcggccagcgaggctgggggcccggcgcgcctcgagtactacgagaacgagaagaagtggcggcacaagtcgagcgcccccaaacgctcgatcccccttgagagctgcttcaacatcaacaagcgggctgactccaagaacaagcacctggtggctctctacacccgggacgagcactttgccatcgcggcggacagcgaggccgagcaagacagctggtaccaggctctcctacagctgcacaaccgtgctaagggccaccacgacggagctgcggccctcggggcgggaggtggtgggggcagctgcagcggcagctccggccttggtgaggctggggaggacttgagctacggtgacgtgcccccaggacccgcattcaaagaggtctggcaagtgatcctgaagcccaagggcctgggtcagacaaagaacctgattggtatctaccgcctttgcctgaccagcaagaccatcagcttcgtgaagctgaactcggaggcagcggccgtggtgctgcagctgatgaacatcaggcgctgtggccactcggaaaacttcttcttcatcgaggtgggccgttctgccgtgacggggcccggggagttctggatgcaggtggatgactctgtggtggcccagaacatgcacgagaccatcctggaggccatgcgggccatgagtgatgagttccgccctcgcagcaagagccagtcctcgtccaactgctctaaccccatcagcgtccccctgcgccggcaccatctcaacaatcccccgcccagccaggtggggctgacccgccgatcacgcactgagagcatcaccgccacctccccggccagcatggtgggcgggaagccaggctccttccgtgtccgcgcctccagtgacggcgaaggcaccatgtcccgcccagcctcggtggacggcagccctgtgagtcccagcaccaacagaacccacgcccaccggcatcggggcagcgcccggctgcaccccccgctcaaccacagccgctccatccccatgccggcttcccgctgctcgccttcggccaccagcccggtcagtctgtcgtccagtagcaccagtggccatggctccacctcggattgtctcttcccacggcgatctagtgcttcggtgtctggttcccccagcgatggcggtttcatctcctcggatgagtatggctccagtccctgcgatttccggagttccttccgcagtgtcactccggattccctgggccacaccccaccagcccgcggtgaggaggagctaagcaactatatctgcatgggtggcaaggggccctccaccctgaccgcccccaacggtcactacattttgtctcggggtggcaatggccaccgctgcaccccaggaacaggcttgggcacgagtccagccttggctggggatgaagcagccagtgctgcagatctggataatcggttccgaaagagaactcactcggcaggcacatcccctaccattacccaccagaagaccccgtcccagtcctcagtggcttccattgaggagtacacagagatgatgcctgcctacccaccaggaggtggcagtggaggccgactgccgggacacaggcactccgccttcgtgcccacccgctcctacccagaggagggtctggaaatgcaccccttggagcgtcggggggggcaccaccgcccagacagctccaccctccacacggatgatggctacatgcccatgtccccaggggtggccccagtgcccagtggccgaaagggcagtggagactatatgcccatgagccccaagagcgtatctgccccacagcagatcatcaatcccatcagacgccatccccagagagtggaccccaatggctacatgatgatgtcccccagcggtggctgctctcctgacattggaggtggccccagcagcagcagcagcagcagcaacgccgtcccttccgggaccagctatggaaagctgtggacaaacggggtagggggccaccactctcatgtcttgcctcaccccaaacccccagtggagagcagcggtggtaagctcttaccttgcacaggtgactacatgaacatgtcaccagtgggggactccaacaccagcagcccctccgactgctactacggccctgaggacccccagcacaagccagtcctctcctactactcattgccaagatcctttaagcacacccagcgccccggggagccggaggagggtgcccggcatcagcacctccgcctttccactagctctggtcgccttctctatgctgcaacagcagatgattcttcctcttccaccagcagcgacagcctgggtgggggatactgcggggctaggctggagcccagccttccacatccccaccatcaggttctgcagccccatctgcctcgaaaggtggacacagctgctcagaccaatagccgcctggcccggcccacgaggctgtccctgggggatcccaaggccagcaccttacctcgggcccgagagcagcagcagcagcagcagcccttgctgcaccctccagagcccaagagcccgggggaatatgtcaatattgaatttgggagtgatcagtctggctacttgtctggcccggtggctttccacagctcaccttctgtcaggtgtccatcccagctccagccagctcccagagaggaagagactggcactgaggagtacatgaagatggacctggggccgggccggagggcagcctggcaggagagcactggggtcgagatgggcagactgggccctgcacctcccggggctgctagcatttgcaggcctacccgggcagtgcccagcagccggggtgactacatgaccatgcagatgagttgtccccgtcagagctacgtggacacctcgccagctgcccctgtaagctatgctgacatgcgaacaggcattgctgcagaggaggtgagcctgcccagggccaccatggctgctgcctcctcatcctcagcagcctctgcttccccgactgggcctcaaggggcagcagagctggctgcccactcgtccctgctggggggcccacaaggacctgggggcatgagcgccttcacccgggtgaacctcagtcctaaccgcaaccagagtgccaaagtgatccgtgcagacccacaagggtgccggcggaggcatagctccgagactttctcctcaacacccagtgccacccgggtgggcaacacagtgccctttggagcgggggcagcagtagggggcggtggcggtagcagcagcagcagcgaggatgtgaaacgccacagctctgcttcctttgagaatgtgtggctgaggcctggggagcttgggggagcccccaaggagccagccaaactgtgtggggctgctgggggtttggagaatggtcttaactacatagacctggatttggtcaaggacttcaaacagtgccctcaggagtgcacccctgaaccgcagcctcccccacccccaccccctcatcaacccctgggcagcggtgagagcagctccacccgccgctcaagtgaggatttaagcgcctatgccagcatcagtttccagaagcagccagaggaccgtcagtag

SEQ ID NO: 80 - protein, 1242 aa, Homo sapiens
  Amino acid sequence of IRS-1
MASPPESDGFSDVRKVGYLRKPKSMHKRFFVLRAASEAGGPARLEYYENEKKWRHKSSAPKRSIPLESCFNINKRADSKNKHLVALYTRDEHFAIAADSEAEQDSWYQALLQLHNRAKGHHDGAAALGAGGGGGSCSGSSGLGEAGEDLSYGDVPPGPAFKEVWQVILKPKGLGQTKNLIGIYRLCLTSKTISFVKLNSEAAAVVLQLMNIRRCGHSENFFFIEVGRSAVTGPGEFWMQVDDSVVAQNMHETILEAMRAMSDEFRPRSKSQSSSNCSNPISVPLRRHHLNNPPPSQVGLTRRSRTESITATSPASMVGGKPGSFRVRASSDGEGTMSRPASVDGSPVSPSTNRTHAHRHRGSARLHPPLNHSRSIPMPASRCSPSATSPVSLSSSSTSGHGSTSDCLFPRRSSASVSGSPSDGGFISSDEYGSSPCDFRSSFRSVTPDSLGHTPPARGEEELSNYICMGGKGPSTLTAPNGHYILSRGGNGHRCTPGTGLGTSPALAGDEAASAADLDNRFRKRTHSAGTSPTITHQKTPSQSSVASIEEYTEMMPAYPPGGGSGGRLPGHRHSAFVPTRSYPEEGLEMHPLERRGGHHRPDSSTLHTDDGYMPMSPGVAPVPSGRKGSGDYMPMSPKSVSAPQQIINPIRRHPQRVDPNGYMMMSPSGGCSPDIGGGPSSSSSSSNAVPSGTSYGKLWTNGVGGHHSHVLPHPKPPVESSGGKLLPCTGDYMNMSPVGDSNTSSPSDCYYGPEDPQHKPVLSYYSLPRSFKHTQRPGEPEEGARHQHLRLSTSSGRLLYAATADDSSSSTSSDSLGGGYCGARLEPSLPHPHHQVLQPHLPRKVDTAAQTNSRLARPTRLSLGDPKASTLPRAREQQQQQQPLLHPPEPKSPGEYVNIEFGSDQSGYLSGPVAFHSSPSVRCPSQLQPAPREEETGTEEYMKMDLGPGRRAAWQESTGVEMGRLGPAPPGAASICRPTRAVPSSRGDYMTMQMSCPRQSYVDTSPAAPVSYADMRTGIAAEEVSLPRATMAAASSSSAASASPTGPQGAAELAAHSSLLGGPQGPGGMSAFTRVNLSPNRNQSAKVIRADPQGCRRRHSSETFSSTPSATRVGNTVPFGAGAAVGGGGGSSSSSEDVKRHSSASFENVWLRPGELGGAPKEPAKLCGAAGGLENGLNYIDLDLVKDFKQCPQECTPEPQPPPPPPPHQPLGSGESSSTRRSSEDLSAYASISFQKQPEDRQ

SEQ ID NO: 81 - DNA, 3144 bp, Homo sapiens
  Coding sequence for RASA1
atgatggcggccgaggccggcagtgaggagggcggcccggtaacagccggagctggaggaggcggcgcggcagcgggctccagtgcctatcccgcagtgtgtcgggtgaagatacccgcggccctgcctgtggcagccgccccctatcctgggctggtggagaccggagtggctggaactctgggtggcggagccgctttggggtcagagttcctaggagccgggtctgtggcaggggcactggggggagctggactgacagggggaggtactgctgctggcgtagctggtgctgctgctggcgtggccggtgctgctgttgctggacctagtggagacatggctctcaccaaactgcccacttcgttgcttgctgagactctcgggccaggcggcggttttccccctctgccccctcccccttacctgccccctttgggggcgggcctcgggacagtggacgaaggtgactctctggatggaccagaatacgaggaggaagaggtggccataccgttgaccgctcctccaactaaccagtggtatcacggaaaacttgacagaacgatagcagaagaacgcctcaggcaggcagggaagtctggcagttatcttataagagagagtgatcggaggccagggtcctttgtactttcatttcttagccagatgaatgttgtcaaccattttaggattattgctatgtgtggagattactacattggtggaagacgtttttcttcactgtcagacctaataggttattacagtcatgtttcttgtttgcttaaaggagaaaaattactttacccagttgcaccaccagagccagtagaagatagaaggcgtgtacgagctattctaccttacacaaaagtaccagacactgatgaaataagtttcttaaaaggagatatgttcattgttcataatgaattagaagatggatggatgtgggttacaaatttaagaacagatgaacaaggccttattgttgaagacctagtagaagaggtgggccgggaagaagatccacatgaaggaaaaatatggttccatgggaagatttccaaacaggaagcttataatttactaatgacagttggtcaagtctgcagttttcttgtgaggccctcagataatactcctggcgattattcactttatttccggaccaatgaaaatattcagcgatttaaaatatgtccaacgccaaacaatcagtttatgatgggaggccggtattataacagcattggggacatcatagatcactatcgaaaagaacagattgttgaaggatattatcttaaggaacctgtaccaatgcaggatcaagaacaagtactcaatgacacagtggatggcaaggaaatctataataccatccgtcgtaaaacaaaggatgccttttataaaaacattgttaagaaaggttatcttctgaaaaagggcaaaggaaaacgttggaaaaatttatattttatcttagagggtagtgatgcccaacttatttattttgaaagcgaaaaacgagctaccaaaccaaaaggattaatagatctcagtgtatgttctgtctatgtcgttcatgatagtctctttggcaggccaaactgttttcagatagtagttcagcactttagtgaagaacattacatcttttactttgcaggagaaactccagaacaagcagaggattggatgaaaggtctgcaggcattttgcaatttacggaaaagtagtccagggacatccaataaacgccttcgtcaggtcagcagccttgttttacatattgaagaagcccataaactcccagtaaaacattttactaatccatattgtaacatctacctgaatagtgtccaagtagcaaaaactcatgcaagggaagggcaaaacccagtatggtcagaagagtttgtctttgatgatcttcctcctgacatcaatagatttgaaataactcttagtaataaaacaaagaaaagcaaagatcctgatatcttatttatgcgctgccagttgagccgattacagaaagggcatgccacagatgaatggtttctgctcagctcccatataccattaaaaggtattgaaccagggtccctgcgtgttcgagcacgatactctatggaaaaaatcatgccagaagaagagtacagtgaatttaaagagcttatactgcaaaaggaacttcatgtagtctatgctttatcacatgtatgtggacaagaccgaacactactggccagcatcctactgaggatttttcttcacgaaaagcttgaatcgttgttgttatgcacactaaatgacagagaaataagcatggaagatgaagccactaccctatttcgagccacaacacttgcaagcaccttgatggagcagtatatgaaagccactgctacacagtttgttcatcatgctttgaaagactctattttaaagataatggaaagcaagcagtcttgtgagttaagtccatcaaagttagaaaaaaatgaagatgtgaacactaatttaacacacctattgaacatactttcagagcttgtggagaaaatattcatggcttcagaaatacttccaccgacattgagatatatttatgggtgtttacagaaatctgttcagcataagtggcctacaaataccaccatgagaacaagagttgttagtggttttgtttttcttcgactcatctgtcctgccatcctgaatccacggatgttcaatatcatctcagattctccatctcctattgctgcaagaacactgatattagtggctaaatctgtgcagaacttagcaaatcttgtggaatttggagctaaggagccctacatggaaggtgtcaatccattcatcaaaagcaacaaacatcgtatgatcatgtttttagatgaacttgggaatgtacctgaacttccggacactacagagcattctagaacggacctgtcccgtgatttagcagcattgcatgagatttgcgtggctcattcagatgaacttcgaacgctcagtaatgagcgtggtgcacagcagcacgtattgaaaaagcttctggctataacagaactgcttcaacaaaaacaaaaccagtatacaaaaaccaatgatgtcaggtag

SEQ ID NO: 82 - protein, 1047 aa, Homo sapiens
  Amino acid sequence of Gap
MMAAEAGSEEGGPVTAGAGGGGAAAGSSAYPAVCRVKIPAALPVAAAPYPGLVETGVAGTLGGGAALGSEFLGAGSVAGALGGAGLTGGGTAAGVAGAAAGVAGAAVAGPSGDMALTKLPTSLLAETLGPGGGFPPLPPPPYLPPLGAGLGTVDEGDSLDGPEYEEEEVAIPLTAPPTNQWYHGKLDRTIAEERLRQAGKSGSYLIRESDRRPGSFVLSFLSQMNVVNHFRIIAMCGDYYIGGRRFSSLSDLIGYYSHVSCLLKGEKLLYPVAPPEPVEDRRRVRAILPYTKVPDTDEISFLKGDMFIVHNELEDGWMWVTNLRTDEQGLIVEDLVEEVGREEDPHEGKIWFHGKISKQEAYNLLMTVGQVCSFLVRPSDNTPGDYSLYFRTNENIQRFKICPTPNNQFMMGGRYYNSIGDIIDHYRKEQIVEGYYLKEPVPMQDQEQVLNDTVDGKEIYNTIRRKTKDAFYKNIVKKGYLLKKGKGKRWKNLYFILEGSDAQLIYFESEKRATKPKGLIDLSVCSVYVVHDSLFGRPNCFQIVVQHFSEEHYIFYFAGETPEQAEDWMKGLQAFCNLRKSSPGTSNKRLRQVSSLVLHIEEAHKLPVKHFTNPYCNIYLNSVQVAKTHAREGQNPVWSEEFVFDDLPPDINRFEITLSNKTKKSKDPDILFMRCQLSRLQKGHATDEWFLLSSHIPLKGIEPGSLRVRARYSMEKIMPEEEYSEFKELILQKELHVVYALSHVCGQDRTLLASILLRIFLHEKLESLLLCTLNDREISMEDEATTLFRATTLASTLMEQYMKATATQFVHHALKDSILKIMESKQSCELSPSKLEKNEDVNTNLTHLLNILSELVEKIFMASEILPPTLRYIYGCLQKSVQHKWPTNTTMRTRVVSGFVFLRLICPAILNPRMFNIISDSPSPIAARTLILVAKSVQNLANLVEFGAKEPYMEGVNPFIKSNKHRMIMFLDELGNVPELPDTTEHSRTDLSRDLAALHEICVAHSDELRTLSNERGAQQHVLKKLLAITELLQQKQNQYTKTNDVR

SEQ ID NO: 83 - DNA, 2538 bp, Homo sapiens
  Coding sequence for VAV1
atggagctgtggcgccaatgcacccactggctcatccagtgccgggtgctgccgcccagccaccgcgtgacctgggatggggctcaggtgtgtgaactggcccaggccctccgggatggtgtccttctgtgtcagctgcttaacaacctgctaccccatgccatcaacctgcgtgaggtcaacctgcgcccccagatgtcccagttcctgtgccttaagaacattagaaccttcctgtccacctgctgtgagaagttcggcctcaagcggagcgagctcttcgaagcctttgacctcttcgatgtgcaggattttggcaaggtcatctacaccctgtctgctctgtcctggaccccgatcgcccagaacagggggatcatgcccttccccaccgaggaggagagtgtaggtgatgaagacatctacagtggcctgtccgaccagatcgacgacacggtggaggaggatgaggacctgtatgactgcgtggagaatgaggaggcggaaggcgacgagatctatgaggacctcatgcgctcggagcccgtgtccatgccgcccaagatgacagagtatgacaagcgctgctgctgcctgcgggagatccagcagacggaggagaagtacactgacacgctgggctccatccagcagcatttcttgaagcccctgcaacggttcctgaaacctcaagacattgagatcatctttatcaacattgaggacctgcttcgtgttcatactcacttcctaaaggagatgaaggaagccctgggcacccctggcgcagccaatctctaccaggtcttcatcaaatacaaggagaggttcctcgtctatggccgctactgcagccaggtggagtcagccagcaaacacctggaccgtgtggccgcagcccgggaggacgtgcagatgaagctggaggaatgttctcagagagccaacaacgggaggttcaccctgcgggacctgctgatggtgcctatgcagcgagttctcaaatatcacctccttctccaggagctggtgaaacacacgcaggaggcgatggagaaggagaacctgcggctggccctggatgccatgagggacctggctcagtgcgtgaacgaggtcaagcgagacaacgagacactgcgacagatcaccaatttccagctgtccattgagaacctggaccagtctctggctcactatggccggcccaagatcgacggggaactcaagatcacctcggtggaacggcgctccaagatggacaggtatgccttcctgctcgacaaagctctactcatctgtaagcgcaggggagactcctatgacctcaaggactttgtaaacctgcacagcttccaggttcgggatgactcttcaggagaccgagacaacaagaagtggagccacatgttcctcctgatcgaggaccaaggtgcccagggctatgagctgttcttcaagacaagagaattgaagaagaagtggatggagcagtttgagatggccatctccaacatctatccggagaatgccaccgccaacgggcatgacttccagatgttctcctttgaggagaccacatcctgcaaggcctgtcagatgctgcttagaggtaccttctatcagggctaccgctgccatcggtgccgggcatctgcacacaaggagtgtctggggagggtccctccatgtggccgacatgggcaagatttcccaggaactatgaagaaggacaaactacatcgcagggctcaggacaaaaagaggaatgagctgggtctgcccaagatggaggtgtttcaggaatactacgggcttcctccaccccctggagccattggaccctttctacggctcaaccctggagacattgtggagctcacgaaggctgaggctgaacagaactggtgggagggcagaaatacatctactaatgaaattggctggtttccttgtaacagggtgaagccctatgtccatggccctcctcaggacctgtctgttcatctctggtacgcaggccccatggagcgggcaggggcagagagcatcctggccaaccgctcggacgggactttcttggtgcggcagagggtgaaggatgcagcagaatttgccatcagcattaaatataacgtcgaggtcaagcacattaaaatcatgacagcagaaggactgtaccggatcacagagaaaaaggctttccgggggcttacggagctggtggagttttaccagcagaactctctaaaggattgcttcaagtctctggacaccaccttgcagttccccttcaaggagcctgaaaagagaaccatcagcaggccagcagtgggaagcacaaagtattttggcacagccaaagcccgctatgacttctgcgcccgagaccgatcagagctgtcgctcaaggagggtgacatcatcaagatccttaacaagaagggacagcaaggctggtggcgaggggagatctatggccgggttggctggttccctgccaactacgtggaggaagattattctgaatactgctga

SEQ ID NO: 84 - protein, 845 aa, Homo sapiens
  Amino acid sequence of Vav1
MELWRQCTHWLIQCRVLPPSHRVTWDGAQVCELAQALRDGVLLCQLLNNLLPHAINLREVNLRPQMSQFLCLKNIRTFLSTCCEKFGLKRSELFEAFDLFDVQDFGKVIYTLSALSWTPIAQNRGIMPFPTEEESVGDEDIYSGLSDQIDDTVEEDEDLYDCVENEEAEGDEIYEDLMRSEPVSMPPKMTEYDKRCCCLREIQQTEEKYTDTLGSIQQHFLKPLQRFLKPQDIEIIFINIEDLLRVHTHFLKEMKEALGTPGAANLYQVFIKYKERFLVYGRYCSQVESASKHLDRVAAAREDVQMKLEECSQRANNGRFTLRDLLMVPMQRVLKYHLLLQELVKHTQEAMEKENLRLALDAMRDLAQCVNEVKRDNETLRQITNFQLSIENLDQSLAHYGRPKIDGELKITSVERRSKMDRYAFLLDKALLICKRRGDSYDLKDFVNLHSFQVRDDSSGDRDNKKWSHMFLLIEDQGAQGYELFFKTRELKKKWMEQFEMAISNIYPENATANGHDFQMFSFEETTSCKACQMLLRGTFYQGYRCHRCRASAHKECLGRVPPCGRHGQDFPGTMKKDKLHRRAQDKKRNELGLPKMEVFQEYYGLPPPPGAIGPFLRLNPGDIVELTKAEAEQNWWEGRNTSTNEIGWFPCNRVKPYVHGPPQDLSVHLWYAGPMERAGAESILANRSDGTFLVRQRVKDAAEFAISIKYNVEVKHIKIMTAEGLYRITEKKAFRGLTELVEFYQQNSLKDCFKSLDTTLQFPFKEPEKRTISRPAVGSTKYFGTAKARYDFCARDRSELSLKEGDIIKILNKKGQQGWWRGEIYGRVGWFPANYVEEDYSEYC

SEQ ID NO: 85 - DNA, 2520 bp, Homo sapiens
  Coding sequence for VAV2
atggagcagtggcgacagtgcggccgctggctcatcgattgcaaggtcctgccgcccaaccaccgggtggtgtggccctcggccgtggtcttcgacctggcgcaggcgctgcgcgacggggtccttctgtgccagctgctgcacaacctctcccccggctccatcgacctcaaggacatcaacttccggccgcagatgtcccagtttctgtgtttgaagaacatacgcaccttcctgaaagtctgccacgataaatttggattaaggaacagcgagctgtttgacccctttgacctcttcgatgtgcgagactttggaaaggtcatctccgcggtgtcgaggctctccctgcacagcatcgcgcagaacaaagggatcaggccttttccctcagaggagaccacagagaatgacgatgacgtctaccgcagcctggaggagctggccgacgagcatgacctgggggaggacatctacgactgcgtcccgtgtgaggatggaggggacgacatctacgaggacatcatcaaggtggaggtgcagcagcccatgaaaatgggcatgactgaagatgacaagaggaactgctgcctgctggagatccaggagaccgaggccaagtactaccgcaccctggaggacattgagaagaactacatgagccccctgcggctggtgctgagcccggcggacatggcagctgtcttcattaacctggaggacctgatcaaggtgcatcacagcttcctgagggccatcgacgtgtccgtgatggtggggggcagcacgctggccaaggtcttcctcgatttcaaggaaaggcttctgatctacggggagtactgcagccacatggagcacgcccagaacacactgaaccagctcctggccagccgggaggacttcaggcagaaagtcgaggagtgcacactgaaggtccaggatggaaaatttaagctgcaagacctgctggtggtccccatgcagagggtgctcaaataccacctgctcttgaaggagcttctgagccattctgcggaacggcctgagaggcagcagctcaaagaagcactggaagccatgcaggacttggcgatgtacatcaatgaagttaaacgggacaaggagaccttgaggaaaatcagcgaatttcagagttctatagaaaatttgcaagtgaaactggaggaatttggaagaccaaagattgacggggaactgaaagtccggtccatagtcaaccacaccaagcaggacaggtacttgttcctgtttgacaaggtggtcatcgtctgcaagcggaagggctacagctacgagctcaaggagatcatcgagctgctgttccacaagatgaccgacgaccccatgaacaacaaggacgtcaagaagtggtcctacggcttctacctaattcaccttcaaggaaagcagggcttccagtttttctgcaaaacagaagatatgaagaggaagtggatggagcagtttgagatggccatgtcaaacatcaagccagacaaagccaatgccaaccaccacagtttccagatgtacacgtttgacaagaccaccaactgcaaagcctgcaaaatgttcctcaggggcaccttctaccagggatacatgtgtaccaagtgtggcgtcggggcacacaaggagtgcctggaagtgatacctccctgcaagttcacttctcctgcagatctggacgcctccggagcgggaccaggtcccaagatggtggccatgcagaattaccatggcaacccagcccctcccgggaagcctgtgctgaccttccagacgggcgacgtgcttgagctgctgaggggcgaccctgagtctccgtggtgggagggtcgtctggtacaaaccaggaagtcagggtatttccccagctcatctgtgaagccctgccctgtggatggaaggccgcccatcagccggccgccatcccgggagatcgactacactgcatacccctggtttgcaggtaacatggagaggcagcagacggacaacctgctcaagtcccacgccagcgggacctacctgatcagggagcggcctgccgaggctgagcgctttgcaataagcatcaagttcaatgatgaggtgaagcacatcaaggtggtggagaaggacaactggatccacatcacagaggccaagaaattcgacagcctcctggagttggtggagtactaccagtgccactcactgaaggagagcttcaagcagctggacaccacactcaagtacccctacaagtcccgggaacgttcggcctccagggcctccagccggtccccagtgttcacgccccgcgtcatcggcacagctgtggccaggtataactttgccgcccgagatatgagggagctttcgctgcgggagggtgacgtggtgaggatctacagccgcatcggcggagaccagggctggtggaagggcgagaccaacggacggattggctggtttccttcaacgtacgtagaagaggagggcatccagtga

SEQ ID NO: 86 - protein, 839 aa, Homo sapiens
  Amino acid sequence of Vav2
MEQWRQCGRWLIDCKVLPPNHRVVWPSAVVFDLAQALRDGVLLCQLLHNLSPGSIDLKDINFRPQMSQFLCLKNIRTFLKVCHDKFGLRNSELFDPFDLFDVRDFGKVISAVSRLSLHSIAQNKGIRPFPSEETTENDDDVYRSLEELADEHDLGEDIYDCVPCEDGGDDIYEDIIKVEVQQPMKMGMTEDDKRNCCLLEIQETEAKYYRTLEDIEKNYMSPLRLVLSPADMAAVFINLEDLIKVHHSFLRAIDVSVMVGGSTLAKVFLDFKERLLIYGEYCSHMEHAQNTLNQLLASREDFRQKVEECTLKVQDGKFKLQDLLVVPMQRVLKYHLLLKELLSHSAERPERQQLKEALEAMQDLAMYINEVKRDKETLRKISEFQSSIENLQVKLEEFGRPKIDGELKVRSIVNHTKQDRYLFLFDKVVIVCKRKGYSYELKEIIELLFHKMTDDPMNNKDVKKWSYGFYLIHLQGKQGFQFFCKTEDMKRKWMEQFEMAMSNIKPDKANANHHSFQMYTFDKTTNCKACKMFLRGTFYQGYMCTKCGVGAHKECLEVIPPCKFTSPADLDASGAGPGPKMVAMQNYHGNPAPPGKPVLTFQTGDVLELLRGDPESPWWEGRLVQTRKSGYFPSSSVKPCPVDGRPPISRPPSREIDYTAYPWFAGNMERQQTDNLLKSHASGTYLIRERPAEAERFAISIKFNDEVKHIKVVEKDNWIHITEAKKFDSLLELVEYYQCHSLKESFKQLDTTLKYPYKSRERSASRASSRSPVFTPRVIGTAVARYNFAARDMRELSLREGDVVRIYSRIGGDQGWWKGETNGRIGWFPSTYVEEEGIQ

SEQ ID NO: 87 - DNA, 3129 bp, Homo sapiens
  Coding sequence for VAV3
atgcccgggatcgtggtgttccggcggcgctggtctgtgggcagtgatgacctcgtcctaccggccatcttcctctttctcctgcataccacctggtttgtgatcctgtccgtggtgctcttcggcctggtctataacccgcacgaggcctgctccctgaacctggtggaccacggccgcggctacctgggcatcctgctgagctgcatgatcgctgagatggccatcatctggctgagcatgcgcgggggcatcctctacacggagccccgtgactccatgcagtacgtgctctacgtgcgcctggccatcctggtgatcgagttcatctacgccatcgtgggcatcgtctggctcactcagtactacacctcctgcaacgacctcactgccaagaatgtcaccctcggaatggttgtctgcaactgggtagtcatcctcagtgtgtgcatcactgtcctctgcgtcttcgaccccacgggccgcacctttgtcaagctgagagccaccaagaggaggcagcgtaacctgcggacctacaacctgcggcaccgcttagaggagggtcaagccaccagctggtcgcgccggctcaaagtgttcctctgctgcacgcggacgaaggactcccagtcagatgcctactcagaaatcgcctacctctttgcggagttcttccgggaccttgacattgtgccatccgacatcattgctggcctggtgctgctccggcagcggcagcgggccaagcgcaacgccgtgctggacgaggcaaacaatgacatcttggccttcctgtctgggatgccggtgaccagaaacaccaagtacctcgacctcaagaattcacaagagatgctccgctacaaagaggtctgctactacatgctctttgccctggctgcctacgggtggcccatgtacctgatgcggaagcccgcctgcggcctctgccaactggctcggtcctgctcgtgttgcctgtgtcctgcgaggccgcggttcgcccctggagtcaccatcgaggaagacaactgctgtggctgtaatgccattgccatccggcgccacttcctggacgagaacatgactgcggtggacatcgtctatacctcctgccatgatgcggtctatgaaacgcccttctacgtggcggtggaccatgacaagaagaaagtggtgatcagtatccgggggaccctgtcccccaaggatgccctgactgacctgacgggtgatgctgagcgcctccccgtggaggggcaccacggcacctggctgggccacaagggtatggtcctctcagctgagtacatcaagaagaaactggagcaggagatggtcctgtcccaggcctttgggcgagacctgggccgcggaaccaaacactacggcctgattgtggtgggccactccctgggcgcgggcactgctgccatcctctccttccttctgcgcccacagtatccgaccctcaagtgctttgcctactccccgccagggggcctgctgagtgaggatgcgatggagtattccaaggagttcgtgactgctgtggttctgggcaaagacctcgtccccaggattggcctctctcagctggaaggcttccgcagacagctcctggatgtcctgcagcgaagcaccaagcccaaatggcggatcatcgtgggggccaccaaatgcatccccaagtcggagctgcctgaggaggtagaggtgaccaccctggccagcacgcggctctggacccaccccagcgacctaactatagccctctcagccagcactccactctacccgcccggccgcatcatccacgtggtccacaaccaccctgcagagcagtgctgctgctgtgagcaggaggagcccacatactttgccatctggggcgacaacaaggccttcaatgaggtgatcatctcgccagccatgctgcatgagcacctgccctatgtggtcatggaggggctcaacaaggtgctggagaactacaacaaggggaagaccgctctgctctctgcagccaaggtcatggtgagccctaccgaggtggacctgactcctgagctcatcttccagcagcagccactccccacggggccgcccatgcccactggccttgccctggagctgccgactgcagaccaccgcaacagcagcgtcaggagcaagtcccagtctgagatgagcctggagggcttctcggaggggcggctgctgtcgccagtggttgcggcggcggcccgccaggacccggtggagctgctgctgctgtctacccaggagcggctggcggcggagctgcaggcccggcgggcaccactggccaccatggagagcctctcggacactgagtccctgtacagcttcgactcgcgccgctcctcaggcttccgcagcatccggggctcccccagcctccacgctgtgctggagcgtgatgaaggccacctcttctacattgaccctgccatccccgaggaaaacccatccctgagctcgcgcactgagctgctggcggccgacagcctgtccaagcactcacaggacacgcagcccctggaggcggccctgggcagtggcggcgtcactcctgagcggccccccagtgctgcggccaatgacgaggaggaagaggttggcggtgggggtggcgggccggcctcccgcggggagctggcgctgcacaatgggcgcctgggggactcgcccagtcctcaggtgctggaattcgccgagttcatcgacagcctcttcaacctggacagcaagagcagctccttccaagacctctactgcatggtggtgcccgagagccccaccagtgactacgctgagggccccaagtcccccagccagcaagagatcctgctccgtgcccagttcgagcccaacctggtgcccaagcccccacggctctttgccggctcagccgacccctcctcgggcatctcactctcgccctccttcccgctcagctcctcgggtgagctcatggacctgacgcccacgggcctcagtagccaggaatgcctggcggctgacaagatccggacttctacccccactggccacggagccagccccgccaagcaagatgagctggtcatctcagcacgctag

SEQ ID NO: 88 - protein, 1042 aa, Homo sapiens
  Amino acid sequence of Vav3
MPGIVVFRRRWSVGSDDLVLPAIFLFLLHTTWFVILSVVLFGLVYNPHEACSLNLVDHGRGYLGILLSCMIAEMAIIWLSMRGGILYTEPRDSMQYVLYVRLAILVIEFIYAIVGIVWLTQYYTSCNDLTAKNVTLGMVVCNWVVILSVCITVLCVFDPTGRTFVKLRATKRRQRNLRTYNLRHRLEEGQATSWSRRLKVFLCCTRTKDSQSDAYSEIAYLFAEFFRDLDIVPSDIIAGLVLLRQRQRAKRNAVLDEANNDILAFLSGMPVTRNTKYLDLKNSQEMLRYKEVCYYMLFALAAYGWPMYLMRKPACGLCQLARSCSCCLCPARPRFAPGVTIEEDNCCGCNAIAIRRHFLDENMTAVDIVYTSCHDAVYETPFYVAVDHDKKKVVISIRGTLSPKDALTDLTGDAERLPVEGHHGTWLGHKGMVLSAEYIKKKLEQEMVLSQAFGRDLGRGTKHYGLIVVGHSLGAGTAAILSFLLRPQYPTLKCFAYSPPGGLLSEDAMEYSKEFVTAVVLGKDLVPRIGLSQLEGFRRQLLDVLQRSTKPKWRIIVGATKCIPKSELPEEVEVTTLASTRLWTHPSDLTIALSASTPLYPPGRIIHVVHNHPAEQCCCCEQEEPTYFAIWGDNKAFNEVIISPAMLHEHLPYVVMEGLNKVLENYNKGKTALLSAAKVMVSPTEVDLTPELIFQQQPLPTGPPMPTGLALELPTADHRNSSVRSKSQSEMSLEGFSEGRLLSPVVAAAARQDPVELLLLSTQERLAAELQARRAPLATMESLSDTESLYSFDSRRSSGFRSIRGSPSLHAVLERDEGHLFYIDPAIPEENPSLSSRTELLAADSLSKHSQDTQPLEAALGSGGVTPERPPSAAANDEEEEVGGGGGGPASRGELALHNGRLGDSPSPQVLEFAEFIDSLFNLDSKSSSFQDLYCMVVPESPTSDYAEGPKSPSQQEILLRAQFEPNLVPKPPRLFAGSADPSSGISLSPSFPLSSSGELMDLTPTGLSSQECLAADKIRTSTPTGHGASPAKQDELVISAR

SEQ ID NO: 89 - DNA, 615 bp, Homo sapiens
  Coding sequence for CRK
atggcgggcaacttcgactcggaggagcggagtagctggtactgggggaggttgagtcggcaggaggcggtggcgctgctgcagggccagcggcacggggtgttcctggtgcgggactcgagcaccagccccggggactatgtgctcagcgtctcagagaactcgcgcgtctcccactacatcatcaacagcagcggcccgcgcccgccggtgccaccgtcgcccgcccagcctccgcccggggtgagcccctccagactccgaataggagatcaagagtttgattcattgcctgctttactggaattctacaaaatacactatttggacactacaacgttgatagaaccagtttccagatccaggcagggtagtggagtgattctcaggcaggaggaggcggagtatgtgcgagccctctttgactttaatgggaatgatgaggaagatcttccctttaagaaaggagacatcttgagaatccgggacaagcctgaagagcagtggtggaatgcggaggacagcgaaggcaagagagggatgattccagtcccttacgtcgagaagtatagacctgcctccgcctcagtatcggctctgattggaggtcggtga

SEQ ID NO: 90 - protein, 204 aa, Homo sapiens
  Amino acid sequence of Crk
MAGNFDSEERSSWYWGRLSRQEAVALLQGQRHGVFLVRDSSTSPGDYVLSVSENSRVSHYIINSSGPRPPVPPSPAQPPPGVSPSRLRIGDQEFDSLPALLEFYKIHYLDTTTLIEPVSRSRQGSGVILRQEEAEYVRALFDFNGNDEEDLPFKKGDILRIRDKPEEQWWNAEDSEGKRGMIPVPYVEKYRPASASVSALIGGR

SEQ ID NO: 91 - DNA, 1134 bp, Homo sapiens
  Coding sequence for NCK1
atggcagaagaagtggtggtagtagccaaatttgattatgtggcccaacaagaacaagagttggacatcaagaagaatgagagattatggcttctggatgattctaagtcctggtggcgagttcgaaattccatgaataaaacaggttttgtgccttctaactatgtggaaaggaaaaacagtgctcggaaagcatctattgtgaaaaacctaaaggataccttaggcattggaaaagtgaaaagaaaacctagtgtgccagattctgcatctcctgctgatgatagttttgttgacccaggggaacgtctctatgacctcaacatgcccgcttatgtgaaatttaactacatggctgagagagaggatgaattatcattgataaaggggacaaaggtgatcgtcatggagaaatgcagtgatgggtggtggcgtggtagctacaatggacaagttggatggttcccttcaaactatgtaactgaagaaggtgacagtcctttgggtgaccatgtgggttctctgtcagagaaattagcagcagtcgtcaataacctaaatactgggcaagtgttgcatgtggtacaggctctttacccattcagctcatctaatgatgaagaacttaatttcgagaaaggagatgtaatggatgttattgaaaaacctgaaaatgacccagagtggtggaaatgcaggaagatcaatggtatggttggtctagtaccaaaaaactatgttaccgttatgcagaataatccattaacttcaggtttggaaccatcacctccacagtgtgattacattaggccttcactcactggaaagtttgctggcaatccttggtattatggcaaagtcaccaggcatcaagcagaaatggcattaaatgaaagaggacatgaaggggatttcctcattcgtgatagtgaatcttcgccaaatgatttctcagtatcactaaaagcacaagggaaaaacaagcattttaaagtccaactaaaagagactgtctactgcattgggcagcgtaaattcagcaccatggaagaacttgtagaacattacaaaaaggcaccaatttttacaagtgaacaaggagaaaaattatatcttgtcaagcatttatcatga

SEQ ID NO: 92 - protein, 377 aa, Homo sapiens
  Amino acid sequence of Nck1
MAEEVVVVAKFDYVAQQEQELDIKKNERLWLLDDSKSWWRVRNSMNKTGFVPSNYVERKNSARKASIVKNLKDTLGIGKVKRKPSVPDSASPADDSFVDPGERLYDLNMPAYVKFNYMAEREDELSLIKGTKVIVMEKCSDGWWRGSYNGQVGWFPSNYVTEEGDSPLGDHVGSLSEKLAAVVNNLNTGQVLHVVQALYPFSSSNDEELNFEKGDVMDVIEKPENDPEWWKCRKINGMVGLVPKNYVTVMQNNPLTSGLEPSPPQCDYIRPSLTGKFAGNPWYYGKVTRHQAEMALNERGHEGDFLIRDSESSPNDFSVSLKAQGKNKHFKVQLKETVYCIGQRKFSTMEELVEHYKKAPIFTSEQGEKLYLVKHLS

SEQ ID NO: 93 - DNA, 1143 bp, Homo sapiens; identical to SEQ ID NO: 3
  Coding sequence for NCK2

SEQ ID NO: 94 - protein, 380 aa, Homo sapiens; identical to SEQ ID NO: 4
  Amino acid sequence of Nck2

SEQ ID NO: 95 - DNA, 1788 bp, Homo sapiens
  Coding sequence for PTPN6
atggtgaggtggtttcaccgagacctcagtgggctggatgcagagaccctgctcaagggccgaggtgtccacggtagcttcctggctcggcccagtcgcaagaaccagggtgacttctcgctctccgtcagggtgggggatcaggtgacccatattcggatccagaactcaggggatttctatgacctgtatggaggggagaagtttgcgactctgacagagctggtggagtactacactcagcagcagggtgtcctgcaggaccgcgacggcaccatcatccacctcaagtacccgctgaactgctccgatcccactagtgagaggtggtaccatggccacatgtctggcgggcaggcagagacgctgctgcaggccaagggcgagccctggacgtttcttgtgcgtgagagcctcagccagcctggagacttcgtgctttctgtgctcagtgaccagcccaaggctggcccaggctccccgctcagggtcacccacatcaaggtcatgtgcgagggtggacgctacacagtgggtggtttggagaccttcgacagcctcacggacctggtggagcatttcaagaagacggggattgaggaggcctcaggcgcctttgtctacctgcggcagccgtactatgccacgagggtgaatgcggctgacattgagaaccgagtgttggaactgaacaagaagcaggagtccgaggatacagccaaggctggcttctgggaggagtttgagagtttgcagaagcaggaggtgaagaacttgcaccagcgtctggaagggcagcggccagagaacaagggcaagaaccgctacaagaacattctcccctttgaccacagccgagtgatcctgcagggacgggacagtaacatccccgggtccgactacatcaatgccaactacatcaagaaccagctgctaggccctgatgagaacgctaagacctacatcgccagccagggctgtctggaggccacggtcaatgacttctggcagatggcgtggcaggagaacagccgtgtcatcgtcatgaccacccgagaggtggagaaaggccggaacaaatgcgtcccatactggcccgaggtgggcatgcagcgtgcttatgggccctactctgtgaccaactgcggggagcatgacacaaccgaatacaaactccgtaccttacaggtctccccgctggacaatggagacctgattcgggagatctggcattaccagtacctgagctggcccgaccatggggtccccagtgagcctgggggtgtcctcagcttcctggaccagatcaaccagcggcaggaaagtctgcctcacgcagggcccatcatcgtgcactgcagcgccggcatcggccgcacaggcaccatcattgtcatcgacatgctcatggagaacatctccaccaagggcctggactgtgacattgacatccagaagaccatccagatggtgcgggcgcagcgctcgggcatggtgcagacggaggcgcagtacaagttcatctacgtggccatcgcccagttcattgaaaccactaagaagaagctggaggtcctgcagtcgcagaagggccaggagtcggagtacgggaacatcacctatcccccagccatgaagaatgcccatgccaaggcctcccgcacctcgtccaaacacaaggaggatgtgtatgagaacctgcacactaagaacaagagggaggagaaagtgaagaagcagcggtcagcagacaaggagaagagcaagggttccctcaagaggaagtga

SEQ ID NO: 96 - protein, 595 aa, Homo sapiens
  Amino acid sequence of Shp1
MVRWFHRDLSGLDAETLLKGRGVHGSFLARPSRKNQGDFSLSVRVGDQVTHIRIQNSGDFYDLYGGEKFATLTELVEYYTQQQGVLQDRDGTIIHLKYPLNCSDPTSERWYHGHMSGGQAETLLQAKGEPWTFLVRESLSQPGDFVLSVLSDQPKAGPGSPLRVTHIKVMCEGGRYTVGGLETFDSLTDLVEHFKKTGIEEASGAFVYLRQPYYATRVNAADIENRVLELNKKQESEDTAKAGFWEEFESLQKQEVKNLHQRLEGQRPENKGKNRYKNILPFDHSRVILQGRDSNIPGSDYINANYIKNQLLGPDENAKTYIASQGCLEATVNDFWQMAWQENSRVIVMTTREVEKGRNKCVPYWPEVGMQRAYGPYSVTNCGEHDTTEYKLRTLQVSPLDNGDLIREIWHYQYLSWPDHGVPSEPGGVLSFLDQINQRQESLPHAGPIIVHCSAGIGRTGTIIVIDMLMENISTKGLDCDIDIQKTIQMVRAQRSGMVQTEAQYKFIYVAIAQFIETTKKKLEVLQSQKGQESEYGNITYPPAMKNAHAKASRTSSKHKEDVYENLHTKNKREEKVKKQRSADKEKSKGSLKRK

SEQ ID NO: 97 - DNA, 1602 bp, Homo sapiens
  Coding sequence for LCP2
atggcactgaggaatgtgccctttcgctcagaggtcctgggctgggaccccgacagccttgctgactatttcaagaagctcaactataaggactgtgagaaggcagtgaagaagtaccacatcgatggggctcgcttcttgaacctgacagaaaatgacatccagaagttccccaagctccgggtgccgattctcagtaagttaagtcaggaaatcaacaagaacgaagagaggaggagcatcttcacacgcaaaccccaagtcccgcggtttcctgaagagacagaaagccacgaagaggacaatgggggctggtcgtcctttgaagaagacgattatgaaagtcccaatgatgaccaggatggggaggatgatggagactatgagtcccccaatgaggaggaagaggcacccgtggaagatgacgcggattatgagccgccaccctccaatgacgaggaagctctgcagaactccatcctgcctgccaagcctttccccaactccaactccatgtacatcgaccggcccccctctgggaaaaccccccagcagcctcctgtgcccccccagagaccgatggccgccctcccgcccccaccagccggccggaatcactcgccactgcccccaccccagaccaaccacgaagaacccagcagaagcagaaaccacaaaacggcaaagctccctgctccttcaatagacagaagcacgaaacctcccctagatcgttcattagctccgtttgatagagaacccttcacactaggaaagaaaccaccattttctgacaagccctcgattccagcgggaaggtcactcggggagcatttacccaagattcaaaagcctcctttaccaccgaccacggaaagacatgaaaggagcagccccctgccagggaagaagccacctgtgccaaagcatggatggggaccagacagaagagagaatgatgaagatgatgtgcatcagagacctttgccccagccagcactacttcctatgagctccaacactttcccttcaagatctactaagccaagtcccatgaaccctctcccatcctctcacatgcctggagcattctcagaaagtaacagcagttttccacagagtgcctccctgccaccatacttctctcaaggccctagcaacagaccacctatcagagccgaaggcagaaacttccccttgccacttccaaacaaacctcggcccccatcccccgcggaggaagagaattcattaaatgaagagtggtacgtttcttatattacccgaccagaggcagaagctgctcttagaaagataaaccaggatggcacatttctggtcagagacagctctaaaaaaacaacaaccaatccatatgtcctcatggtgttgtacaaagataaagtttacaacatccagatccgttatcagaaggaaagtcaagtttacttgttgggaactggactccgagggaaagaggactttctgtctgtgtcagatattattgactacttcaggaaaatgccacttctgctcattgatgggaaaaaccgaggttccagataccagtgcacattaacgcatgctgcagggtacccatag

SEQ ID NO: 98 - protein, 533 aa, Homo sapiens
  Amino acid sequence of Slp76
MALRNVPFRSEVLGWDPDSLADYFKKLNYKDCEKAVKKYHIDGARFLNLTENDIQKFPKLRVPILSKLSQEINKNEERRSIFTRKPQVPRFPEETESHEEDNGGWSSFEEDDYESPNDDQDGEDDGDYESPNEEEEAPVEDDADYEPPPSNDEEALQNSILPAKPFPNSNSMYIDRPPSGKTPQQPPVPPQRPMAALPPPPAGRNHSPLPPPQTNHEEPSRSRNHKTAKLPAPSIDRSTKPPLDRSLAPFDREPFTLGKKPPFSDKPSIPAGRSLGEHLPKIQKPPLPPTTERHERSSPLPGKKPPVPKHGWGPDRRENDEDDVHQRPLPQPALLPMSSNTFPSRSTKPSPMNPLPSSHMPGAFSESNSSFPQSASLPPYFSQGPSNRPPIRAEGRNFPLPLPNKPRPPSPAEEENSLNEEWYVSYITRPEAEAALRKINQDGTFLVRDSSKKTTTNPYVLMVLYKDKVYNIQIRYQKESQVYLLGTGLRGKEDFLSVSDIIDYFRKMPLLLIDGKNRGSRYQCTLTHAAGYP

SEQ ID NO: 99 - DNA, 387 bp, Homo sapiens
  Coding sequence for SH2D1A
atggacgcagtggctgtgtatcatggcaaaatcagcagggaaaccggcgagaagctcctgcttgccactgggctggatggcagctatttgctgagggacagcgagagcgtgccaggcgtgtactgcctatgtgtgctgtatcacggttacatttatacataccgagtgtcccagacagaaacaggttcttggagtgctgagacagcacctggggtacataaaagatatttccggaaaataaaaaatctcatttcagcatttcagaagccagatcaaggcattgtaatacctctgcagtatccagttgagaagaagtcctcagctagaagtacacaaggtactacagggataagagaagatcctgatgtctgcctgaaagccccatga

SEQ ID NO: 100 - protein, 128 aa, Homo sapiens
  Amino acid sequence of Sap
MDAVAVYHGKISRETGEKLLLATGLDGSYLLRDSESVPGVYCLCVLYHGYIYTYRVSQTETGSWSAETAPGVHKRYFRKIKNLISAFQKPDQGIVIPLQYPVEKKSSARSTQGTTGIREDPDVCLKAP

SEQ ID NO: 101 - DNA, 636 bp, Homo sapiens
  Coding sequence for SOCS1
atggtagcacacaaccaggtggcagccgacaatgcagtctccacagcagcagagccccgacggcggccagaaccttcctcctcttcctcctcctcgcccgcggcccccgcgcgcccgcggccgtgccccgcggtcccggccccggcccccggcgacacgcacttccgcacattccgttcgcacgccgattaccggcgcatcacgcgcgccagcgcgctcctggacgcctgcggattctactgggggcccctgagcgtgcacggggcgcacgagcggctgcgcgccgagcccgtgggcaccttcctggtgcgcgacagccgccagcggaactgctttttcgcccttagcgtgaagatggcctcgggacccacgagcatccgcgtgcactttcaggccggccgctttcacctggatggcagccgcgagagcttcgactgcctcttcgagctgctggagcactacgtggcggcgccgcgccgcatgctgggggccccgctgcgccagcgccgcgtgcggccgctgcaggagctgtgccgccagcgcatcgtggccaccgtgggccgcgagaacctggctcgcatccccctcaaccccgtcctccgcgactacctgagctccttccccttccagatttga

SEQ ID NO: 102 - protein, 211 aa, Homo sapiens
  Amino acid sequence of Socs1
MVAHNQVAADNAVSTAAEPRRRPEPSSSSSSSPAAPARPRPCPAVPAPAPGDTHFRTFRSHADYRRITRASALLDACGFYWGPLSVHGAHERLRAEPVGTFLVRDSRQRNCFFALSVKMASGPTSIRVHFQAGRFHLDGSRESFDCLFELLEHYVAAPRRMLGAPLRQRRVRPLQELCRQRIVATVGRENLARIPLNPVLRDYLSSFPFQI

SEQ ID NO: 103 - DNA, 597 bp, Homo sapiens
  Coding sequence for SOCS2
atgaccctgcggtgccttgagccctccgggaatggcggggaagggacgcggagccagtgggggaccgcggggtcggcggaggagccatccccgcaggcggcgcgtctggcgaaggccctgcgggagctcggtcagacaggatggtactggggaagtatgactgttaatgaagccaaagagaaattaaaagaggcaccagaaggaactttcttgattagagatagctcgcattcagactacctactaacaatatctgttaaaacatcagctggaccaactaatcttcgaatcgaataccaagacggaaaattcagattggactctatcatatgtgtcaaatccaagcttaaacaatttgacagtgtggttcatctgatcgactactatgttcagatgtgcaaggataagcggacaggtccagaagccccccggaacggcactgttcacctttatctgaccaaaccgctctacacgtcagcaccatctctgcagcatctctgtaggctcaccattaacaaatgtaccggtgccatctggggactgcctttaccaacaagactaaaagattacttggaagaatataaattccaggtataa

SEQ ID NO: 104 - protein, 198 aa, Homo sapiens
  Amino acid sequence of Socs2
MTLRCLEPSGNGGEGTRSQWGTAGSAEEPSPQAARLAKALRELGQTGWYWGSMTVNEAKEKLKEAPEGTFLIRDSSHSDYLLTISVKTSAGPTNLRIEYQDGKFRLDSIICVKSKLKQFDSVVHLIDYYVQMCKDKRTGPEAPRNGTVHLYLTKPLYTSAPSLQHLCRLTINKCTGAIWGLPLPTRLKDYLEEYKFQV

SEQ ID NO: 105 - DNA, 678 bp, Homo sapiens
  Coding sequence for SOCS3
atggtcacccacagcaagtttcccgccgccgggatgagccgccccctggacaccagcctgcgcctcaagaccttcagctccaagagcgagtaccagctggtggtgaacgcagtgcgcaagctgcaggagagcggcttctactggagcgcagtgaccggcggcgaggcgaacctgctgctcagtgccgagcccgccggcacctttctgatccgcgacagctcggaccagcgccacttcttcacgctcagcgtcaagacccagtctgggaccaagaacctgcgcatccagtgtgaggggggcagcttctctctgcagagcgatccccggagcacgcagcccgtgccccgcttcgactgcgtgctcaagctggtgcaccactacatgccgccccctggagccccctccttcccctcgccacctactgaaccctcctccgaggtgcccgagcagccgtctgcccagccactccctgggagtccccccagaagagcctattacatctactccgggggcgagaagatccccctggtgttgagccggcccctctcctccaacgtggccactcttcagcatctctgtcggaagaccgtcaacggccacctggactcctatgagaaagtcacccagctgccggggcccattcgggagttcctggaccagtacgatgccccgctttaa

SEQ ID NO: 106 - protein, 225 aa, Homo sapiens
  Amino acid sequence of Socs3
MVTHSKFPAAGMSRPLDTSLRLKTFSSKSEYQLVVNAVRKLQESGFYWSAVTGGEANLLLSAEPAGTFLIRDSSDQRHFFTLSVKTQSGTKNLRIQCEGGSFSLQSDPRSTQPVPRFDCVLKLVHHYMPPPGAPSFPSPPTEPSSEVPEQPSAQPLPGSPPRRAYYIYSGGEKIPLVLSRPLSSNVATLQHLCRKTVNGHLDSYEKVTQLPGPIREFLDQYDAPL

SEQ ID NO: 107 - DNA, 1323 bp, Homo sapiens
  Coding sequence for SOCS4
atggcagaaaataatgaaaatattagtaaaaatgtagatgtaaggcccaaaactagtcggagcagaagtgccgacagaaaagacggttatgtgtggagtggaaagaagttatcttggtcaaaaaagagtgagagttattcagatgctgagacagtgaatggtatagagaaaaccgaagtgtctttaaggaaccaagaaaggaagcacagctgttcatccattgagttggacttagatcattcctgtgggcatcgatttttaggccgatctcttaaacagaaactgcaagatgccgtggggcagtgttttccaataaagaattgtagtagtcggcactcttcagggcttccgtctaaaaggaaaattcatatcagtgaactcatgttagataagtgtcctttcccacctcgatcagatttagcctttaggtggcattttattaaacgacacactgctcctataaattccaaatcagatgaatgggtaagcacagacttgtctcagactgaattgagggatggtcagctaaaacgaagaaatatggaagaaaatataaactgtttctcacataccaatgttcagccctgtgtcataaccaccgacaatgctttgtgtagagaaggtcctatgactggctctgtgatgaacctggtttcaaataacagtatagaagatagtgatatggattccgatgatgaaattctaacactttgcacaagttccagaaaaagaaacaaacccaaatgggatttggatgatgaaatcctgcagttggaaacacctcctaaataccacacgcagattgattatgtccactgtcttgtaccagacctccttcagatcaataacaacccatgttactggggagtgatggataaatacgcagccgaagcactactggaaggaaaaccagagggtacctttttacttcgagactcagcacaggaagactatttattctctgttagttttagacgctatagtcgttctcttcatgctagaattgaacagtggaatcacaactttagctttgatgcacatgacccctgtgtcttccattctcctgacattactgggctcctagaacattataaggacccaagcgcctgtatgttctttgaaccacttctatccactcccttaattcggactttccctttttccctgcagcatatatgcagaacagttatttgtaactgtacaacttatgatggcatcgatgcccttccaattccttcttctatgaaattatatctgaaggaatatcattataaatcaaaagttagagtactcaggattgatgcaccagaacagcaatgctag

SEQ ID NO: 108 - protein, 440 aa, Homo sapiens
  Amino acid sequence of Socs4
MAENNENISKNVDVRPKTSRSRSADRKDGYVWSGKKLSWSKKSESYSDAETVNGIEKTEVSLRNQERKHSCSSIELDLDHSCGHRFLGRSLKQKLQDAVGQCFPIKNCSSRHSSGLPSKRKIHISELMLDKCPFPPRSDLAFRWHFIKRHTAPINSKSDEWVSTDLSQTELRDGQLKRRNMEENINCFSHTNVQPCVITTDNALCREGPMTGSVMNLVSNNSIEDSDMDSDDEILTLCTSSRKRNKPKWDLDDEILQLETPPKYHTQIDYVHCLVPDLLQINNNPCYWGVMDKYAAEALLEGKPEGTFLLRDSAQEDYLFSVSFRRYSRSLHARIEQWNHNFSFDAHDPCVFHSPDITGLLEHYKDPSACMFFEPLLSTPLIRTFPFSLQHICRTVICNCTTYDGIDALPIPSSMKLYLKEYHYKSKVRVLRIDAPEQQC

SEQ ID NO: 109 - DNA, 3633 bp, Homo sapiens
  Coding sequence for EGFR
atgcgaccctccgggacggccggggcagcgctcctggcgctgctggctgcgctctgcccggcgagtcgggctctggaggaaaagaaagtttgccaaggcacgagtaacaagctcacgcagttgggcacttttgaagatcattttctcagcctccagaggatgttcaataactgtgaggtggtccttgggaatttggaaattacctatgtgcagaggaattatgatctttccttcttaaagaccatccaggaggtggctggttatgtcctcattgccctcaacacagtggagcgaattcctttggaaaacctgcagatcatcagaggaaatatgtactacgaaaattcctatgccttagcagtcttatctaactatgatgcaaataaaaccggactgaaggagctgcccatgagaaatttacaggaaatcctgcatggcgccgtgcggttcagcaacaaccctgccctgtgcaacgtggagagcatccagtggcgggacatagtcagcagtgactttctcagcaacatgtcgatggacttccagaaccacctgggcagctgccaaaagtgtgatccaagctgtcccaatgggagctgctggggtgcaggagaggagaactgccagaaactgaccaaaatcatctgtgcccagcagtgctccgggcgctgccgtggcaagtcccccagtgactgctgccacaaccagtgtgctgcaggctgcacaggcccccgggagagcgactgcctggtctgccgcaaattccgagacgaagccacgtgcaaggacacctgccccccactcatgctctacaaccccaccacgtaccagatggatgtgaaccccgagggcaaatacagctttggtgccacctgcgtgaagaagtgtccccgtaattatgtggtgacagatcacggctcgtgcgtccgagcctgtggggccgacagctatgagatggaggaagacggcgtccgcaagtgtaagaagtgcgaagggccttgccgcaaagtgtgtaacggaataggtattggtgaatttaaagactcactctccataaatgctacgaatattaaacacttcaaaaactgcacctccatcagtggcgatctccacatcctgccggtggcatttaggggtgactccttcacacatactcctcctctggatccacaggaactggatattctgaaaaccgtaaaggaaatcacagggtttttgctgattcaggcttggcctgaaaacaggacggacctccatgcctttgagaacctagaaatcatacgcggcaggaccaagcaacatggtcagttttctcttgcagtcgtcagcctgaacataacatccttgggattacgctccctcaaggagataagtgatggagatgtgataatttcaggaaacaaaaatttgtgctatgcaaatacaataaactggaaaaaactgtttgggacctccggtcagaaaaccaaaattataagcaacagaggtgaaaacagctgcaaggccacaggccaggtctgccatgccttgtgctcccccgagggctgctggggcccggagcccagggactgcgtctcttgccggaatgtcagccgaggcagggaatgcgtggacaagtgcaaccttctggagggtgagccaagggagtttgtggagaactctgagtgcatacagtgccacccagagtgcctgcctcaggccatgaacatcacctgcacaggacggggaccagacaactgtatccagtgtgcccactacattgacggcccccactgcgtcaagacctgcccggcaggagtcatgggagaaaacaacaccctggtctggaagtacgcagacgccggccatgtgtgccacctgtgccatccaaactgcacctacggatgcactgggccaggtcttgaaggctgtccaacgaatgggcctaagatcccgtccatcgccactgggatggtgggggccctcctcttgctgctggtggtggccctggggatcggcctcttcatgcgaaggcgccacatcgttcggaagcgcacgctgcggaggctgctgcaggagagggagcttgtggagcctcttacacccagtggagaagctcccaaccaagctctcttgaggatcttgaaggaaactgaattcaaaaagatcaaagtgctgggctccggtgcgttcggcacggtgtataagggactctggatcccagaaggtgagaaagttaaaattcccgtcgctatcaaggaattaagagaagcaacatctccgaaagccaacaaggaaatcctcgatgaagcctacgtgatggccagcgtggacaacccccacgtgtgccgcctgctgggcatctgcctcacctccaccgtgcagctcatcacgcagctcatgcccttcggctgcctcctggactatgtccgggaacacaaagacaatattggctcccagtacctgctcaactggtgtgtgcagatcgcaaagggcatgaactacttggaggaccgtcgcttggtgcaccgcgacctggcagccaggaacgtactggtgaaaacaccgcagcatgtcaagatcacagattttgggctggccaaactgctgggtgcggaagagaaagaataccatgcagaaggaggcaaagtgcctatcaagtggatggcattggaatcaattttacacagaatctatacccaccagagtgatgtctggagctacggggtgaccgtttgggagttgatgacctttggatccaagccatatgacggaatccctgccagcgagatctcctccatcctggagaaaggagaacgcctccctcagccacccatatgtaccatcgatgtctacatgatcatggtcaagtgctggatgatagacgcagatagtcgcccaaagttccgtgagttgatcatcgaattctccaaaatggcccgagacccccagcgctaccttgtcattcagggggatgaaagaatgcatttgccaagtcctacagactccaacttctaccgtgccctgatggatgaagaagacatggacgacgtggtggatgccgacgagtacctcatcccacagcagggcttcttcagcagcccctccacgtcacggactcccctcctgagctctctgagtgcaaccagcaacaattccaccgtggcttgcattgatagaaatgggctgcaaagctgtcccatcaaggaagacagcttcttgcagcgatacagctcagaccccacaggcgccttgactgaggacagcatagacgacaccttcctcccagtgcctgaatacataaaccagtccgttcccaaaaggcccgctggctctgtgcagaatcctgtctatcacaatcagcctctgaaccccgcgcccagcagagacccacactaccaggacccccacagcactgcagtgggcaaccccgagtatctcaacactgtccagcccacctgtgtcaacagcacattcgacagccctgcccactgggcccagaaaggcagccaccaaattagcctggacaaccctgactaccagcaggacttctttcccaaggaagccaagccaaatggcatctttaagggctccacagctgaaaatgcagaatacctaagggtcgcgccacaaagcagtgaatttattggagcatga

SEQ ID NO: 110 - protein, 1210 aa, Homo sapiens [sequence omitted]

SEQ ID NO: 111 - DNA, 3768 bp, Homo sapiens
  Coding sequence for ERBB2
atggagctggcggccttgtgccgctgggggctcctcctcgccctcttgccccccggagccgcgagcacccaagtgtgcaccggcacagacatgaagctgcggctccctgccagtcccgagacccacctggacatgctccgccacctctaccagggctgccaggtggtgcagggaaacctggaactcacctacctgcccaccaatgccagcctgtccttcctgcaggatatccaggaggtgcagggctacgtgctcatcgctcacaaccaagtgaggcaggtcccactgcagaggctgcggattgtgcgaggcacccagctctttgaggacaactatgccctggccgtgctagacaatggagacccgctgaacaataccacccctgtcacaggggcctccccaggaggcctgcgggagctgcagcttcgaagcctcacagagatcttgaaaggaggggtcttgatccagcggaacccccagctctgctaccaggacacgattttgtggaaggacatcttccacaagaacaaccagctggctctcacactgatagacaccaaccgctctcgggcctgccacccctgttctccgatgtgtaagggctcccgctgctggggagagagttctgaggattgtcagagcctgacgcgcactgtctgtgccggtggctgtgcccgctgcaaggggccactgcccactgactgctgccatgagcagtgtgctgccggctgcacgggccccaagcactctgactgcctggcctgcctccacttcaaccacagtggcatctgtgagctgcactgcccagccctggtcacctacaacacagacacgtttgagtccatgcccaatcccgagggccggtatacattcggcgccagctgtgtgactgcctgtccctacaactacctttctacggacgtgggatcctgcaccctcgtctgccccctgcacaaccaagaggtgacagcagaggatggaacacagcggtgtgagaagtgcagcaagccctgtgcccgagtgtgctatggtctgggcatggagcacttgcgagaggtgagggcagttaccagtgccaatatccaggagtttgctggctgcaagaagatctttgggagcctggcatttctgccggagagctttgatggggacccagcctccaacactgccccgctccagccagagcagctccaagtgtttgagactctggaagagatcacaggttacctatacatctcagcatggccggacagcctgcctgacctcagcgtcttccagaacctgcaagtaatccggggacgaattctgcacaatggcgcctactcgctgaccctgcaagggctgggcatcagctggctggggctgcgctcactgagggaactgggcagtggactggccctcatccaccataacacccacctctgcttcgtgcacacggtgccctgggaccagctctttcggaacccgcaccaagctctgctccacactgccaaccggccagaggacgagtgtgtgggcgagggcctggcctgccaccagctgtgcgcccgagggcactgctggggtccagggcccacccagtgtgtcaactgcagccagttccttcggggccaggagtgcgtggaggaatgccgagtactgcaggggctccccagggagtatgtgaatgccaggcactgtttgccgtgccaccctgagtgtcagccccagaatggctcagtgacctgttttggaccggaggctgaccagtgtgtggcctgtgcccactataaggaccctcccttctgcgtggcccgctgccccagcggtgtgaaacctgacctctcctacatgcccatctggaagtttccagatgaggagggcgcatgccagccttgccccatcaactgcacccactcctgtgtggacctggatgacaagggctgccccgccgagcagagagccagccctctgacgtccatcgtctctgcggtggttggcattctgctggtcgtggtcttgggggtggtctttgggatcctcatcaagcgacggcagcagaagatccggaagtacacgatgcggagactgctgcaggaaacggagctggtggagccgctgacacctagcggagcgatgcccaaccaggcgcagatgcggatcctgaaagagacggagctgaggaaggtgaaggtgcttggatctggcgcttttggcacagtctacaagggcatctggatccctgatggggagaatgtgaaaattccagtggccatcaaagtgttgagggaaaacacatcccccaaagccaacaaagaaatcttagacgaagcatacgtgatggctggtgtgggctccccatatgtctcccgccttctgggcatctgcctgacatccacggtgcagctggtgacacagcttatgccctatggctgcctcttagaccatgtccgggaaaaccgcggacgcctgggctcccaggacctgctgaactggtgtatgcagattgccaaggggatgagctacctggaggatgtgcggctcgtacacagggacttggccgctcggaacgtgctggtcaagagtcccaaccatgtcaaaattacagacttcgggctggctcggctgctggacattgacgagacagagtaccatgcagatgggggcaaggtgcccatcaagtggatggcgctggagtccattctccgccggcggttcacccaccagagtgatgtgtggagttatggtgtgactgtgtgggagctgatgacttttggggccaaaccttacgatgggatcccagcccgggagatccctgacctgctggaaaagggggagcggctgccccagccccccatctgcaccattgatgtctacatgatcatggtcaaatgttggatgattgactctgaatgtcggccaagattccgggagttggtgtctgaattctcccgcatggccagggacccccagcgctttgtggtcatccagaatgaggacttgggcccagccagtcccttggacagcaccttctaccgctcactgctggaggacgatgacatgggggacctggtggatgctgaggagtatctggtaccccagcagggcttcttctgtccagaccctgccccgggcgctgggggcatggtccaccacaggcaccgcagctcatctaccaggagtggcggtggggacctgacactagggctggagccctctgaagaggaggcccccaggtctccactggcaccctccgaaggggctggctccgatgtatttgatggtgacctgggaatgggggcagccaaggggctgcaaagcctccccacacatgaccccagccctctacagcggtacagtgaggaccccacagtacccctgccctctgagactgatggctacgttgcccccctgacctgcagcccccagcctgaatatgtgaaccagccagatgttcggccccagcccccttcgccccgagagggccctctgcctgctgcccgacctgctggtgccactctggaaagggccaagactctctccccagggaagaatggggtcgtcaaagacgtttttgcctttgggggtgccgtggagaaccccgagtacttgacaccccagggaggagctgcccctcagccccaccctcctcctgccttcagcccagccttcgacaacctctattactgggaccaggacccaccagagcggggggctccacccagcaccttcaaagggacacctacggcagagaacccagagtacctgggtctggacgtgccagtgtga

SEQ ID NO: 112 - protein, 1255 aa, Homo sapiens
  Amino acid sequence of HER2
MELAALCRWGLLLALLPPGAASTQVCTGTDMKLRLPASPETHLDMLRHLYQGCQVVQGNLELTYLPTNASLSFLQDIQEVQGYVLIAHNQVRQVPLQRLRIVRGTQLFEDNYALAVLDNGDPLNNTTPVTGASPGGLRELQLRSLTEILKGGVLIQRNPQLCYQDTILWKDIFHKNNQLALTLIDTNRSRACHPCSPMCKGSRCWGESSEDCQSLTRTVCAGGCARCKGPLPTDCCHEQCAAGCTGPKHSDCLACLHFNHSGICELHCPALVTYNTDTFESMPNPEGRYTFGASCVTACPYNYLSTDVGSCTLVCPLHNQEVTAEDGTQRCEKCSKPCARVCYGLGMEHLREVRAVTSANIQEFAGCKKIFGSLAFLPESFDGDPASNTAPLQPEQLQVFETLEEITGYLYISAWPDSLPDLSVFQNLQVIRGRILHNGAYSLTLQGLGISWLGLRSLRELGSGLALIHHNTHLCFVHTVPWDQLFRNPHQALLHTANRPEDECVGEGLACHQLCARGHCWGPGPTQCVNCSQFLRGQECVEECRVLQGLPREYVNARHCLPCHPECQPQNGSVTCFGPEADQCVACAHYKDPPFCVARCPSGVKPDLSYMPIWKFPDEEGACQPCPINCTHSCVDLDDKGCPAEQRASPLTSIVSAVVGILLVVVLGVVFGILIKRRQQKIRKYTMRRLLQETELVEPLTPSGAMPNQAQMRILKETELRKVKVLGSGAFGTVYKGIWIPDGENVKIPVAIKVLRENTSPKANKEILDEAYVMAGVGSPYVSRLLGICLTSTVQLVTQLMPYGCLLDHVRENRGRLGSQDLLNWCMQIAKGMSYLEDVRLVHRDLAARNVLVKSPNHVKITDFGLARLLDIDETEYHADGGKVPIKWMALESILRRRFTHQSDVWSYGVTVWELMTFGAKPYDGIPAREIPDLLEKGERLPQPPICTIDVYMIMVKCWMIDSECRPRFRELVSEFSRMARDPQRFVVIQNEDLGPASPLDSTFYRSLLEDDDMGDLVDAEEYLVPQQGFFCPDPAPGAGGMVHHRHRSSSTRSGGGDLTLGLEPSEEEAPRSPLAPSEGAGSDVFDGDLGMGAAKGLQSLPTHDPSPLQRYSEDPTVPLPSETDGYVAPLTCSPQPEYVNQPDVRPQPPSPREGPLPAARPAGATLERAKTLSPGKNGVVKDVFAFGGAVENPEYLTPQGGAAPQPHPPPAFSPAFDNLYYWDQDPPERGAPPSTFKGTPTAENPEYLGLDVPV

SEQ ID NO: 113 - DNA, 4029 bp, Homo sapiens
  Coding sequence for ERBB3
atgagggcgaacgacgctctgcaggtgctgggcttgcttttcagcctggcccggggctccgaggtgggcaactctcaggcagtgtgtcctgggactctgaatggcctgagtgtgaccggcgatgctgagaaccaataccagacactgtacaagctctacgagaggtgtgaggtggtgatggggaaccttgagattgtgctcacgggacacaatgccgacctctccttcctgcagtggattcgagaagtgacaggctatgtcctcgtggccatgaatgaattctctactctaccattgcccaacctccgcgtggtgcgagggacccaggtctacgatgggaagtttgccatcttcgtcatgttgaactataacaccaactccagccacgctctgcgccagctccgcttgactcagctcaccgagattctgtcagggggtgtttatattgagaagaacgataagctttgtcacatggacacaattgactggagggacatcgtgagggaccgagatgctgagatagtggtgaaggacaatggcagaagctgtcccccctgtcatgaggtttgcaaggggcgatgctggggtcctggatcagaagactgccagacattgaccaagaccatctgtgctcctcagtgtaatggtcactgctttgggcccaaccccaaccagtgctgccatgatgagtgtgccgggggctgctcaggccctcaggacacagactgctttgcctgccggcacttcaatgacagtggagcctgtgtacctcgctgtccacagcctcttgtctacaacaagctaactttccagctggaacccaatccccacaccaagtatcagtatggaggagtttgtgtagccagctgtccccataactttgtggtggatcaaacatcctgtgtcagggcctgtcctcctgacaagatggaagtagataaaaatgggctcaagatgtgtgagccttgtgggggactatgtcccaaagcctgtgagggaacaggctctgggagccgcttccagactgtggactcgagcaacattgatggatttgtgaactgcaccaagatcctgggcaacctggactttctgatcaccggcctcaatggagacccctggcacaagatccctgccctggacccagagaagctcaatgtcttccggacagtacgggagatcacaggttacctgaacatccagtcctggccgccccacatgcacaacttcagtgttttttccaatttgacaaccattggaggcagaagcctctacaaccggggcttctcattgttgatcatgaagaacttgaatgtcacatctctgggcttccgatccctgaaggaaattagtgctgggcgtatctatataagtgccaataggcagctctgctaccaccactctttgaactggaccaaggtgcttcgggggcctacggaagagcgactagacatcaagcataatcggccgcgcagagactgcgtggcagagggcaaagtgtgtgacccactgtgctcctctgggggatgctggggcccaggccctggtcagtgcttgtcctgtcgaaattatagccgaggaggtgtctgtgtgacccactgcaactttctgaatggggagcctcgagaatttgcccatgaggccgaatgcttctcctgccacccggaatgccaacccatggagggcactgccacatgcaatggctcgggctctgatacttgtgctcaatgtgcccattttcgagatgggccccactgtgtgagcagctgcccccatggagtcctaggtgccaagggcccaatctacaagtacccagatgttcagaatgaatgtcggccctgccatgagaactgcacccaggggtgtaaaggaccagagcttcaagactgtttaggacaaacactggtgctgatcggcaaaacccatctgacaatggctttgacagtgatagcaggattggtagtgattttcatgatgctgggcggcacttttctctactggcgtgggcgccggattcagaataaaagggctatgaggcgatacttggaacggggtgagagcatagagcctctggaccccagtgagaaggctaacaaagtcttggccagaatcttcaaagagacagagctaaggaagcttaaagtgcttggctcgggtgtctttggaactgtgcacaaaggagtgtggatccctgagggtgaatcaatcaagattccagtctgcattaaagtcattgaggacaagagtggacggcagagttttcaagctgtgacagatcatatgctggccattggcagcctggaccatgcccacattgtaaggctgctgggactatgcccagggtcatctctgcagcttgtcactcaatatttgcctctgggttctctgctggatcatgtgagacaacaccggggggcactggggccacagctgctgctcaactggggagtacaaattgccaagggaatgtactaccttgaggaacatggtatggtgcatagaaacctggctgcccgaaacgtgctactcaagtcacccagtcaggttcaggtggcagattttggtgtggctgacctgctgcctcctgatgataagcagctgctatacagtgaggccaagactccaattaagtggatggcccttgagagtatccactttgggaaatacacacaccagagtgatgtctggagctatggtgtgacagtttgggagttgatgaccttcggggcagagccctatgcagggctacgattggctgaagtaccagacctgctagagaagggggagcggttggcacagccccagatctgcacaattgatgtctacatggtgatggtcaagtgttggatgattgatgagaacattcgcccaacctttaaagaactagccaatgagttcaccaggatggcccgagacccaccacggtatctggtcataaagagagagagtgggcctggaatagcccctgggccagagccccatggtctgacaaacaagaagctagaggaagtagagctggagccagaactagacctagacctagacttggaagcagaggaggacaacctggcaaccaccacactgggctccgccctcagcctaccagttggaacacttaatcggccacgtgggagccagagccttttaagtccatcatctggatacatgcccatgaaccagggtaatcttggggagtcttgccaggagtctgcagtttctgggagcagtgaacggtgcccccgtccagtctctctacacccaatgccacggggatgcctggcatcagagtcatcagaggggcatgtaacaggctctgaggctgagctccaggagaaagtgtcaatgtgtaggagccggagcaggagccggagcccacggccacgcggagatagcgcctaccattcccagcgccacagtctgctgactcctgttaccccactctccccacccgggttagaggaagaggatgtcaacggttatgtcatgccagatacacacctcaaaggtactccctcctcccgggaaggcaccctttcttcagtgggtctcagttctgtcctgggtactgaagaagaagatgaagatgaggagtatgaatacatgaaccggaggagaaggcacagtccacctcatccccctaggccaagttcccttgaggagctgggttatgagtacatggatgtggggtcagacctcagtgcctctctgggcagcacacagagttgcccactccaccctgtacccatcatgcccactgcaggcacaactccagatgaagactatgaatatatgaatcggcaacgagatggaggtggtcctgggggtgattatgcagccatgggggcctgcccagcatctgagcaagggtatgaagagatgagagcttttcaggggcctggacatcaggccccccatgtccattatgcccgcctaaaaactctacgtagcttagaggctacagactctgcctttgataaccctgattactggcatagcaggcttttccccaaggctaatgcccagagaacgtaa

SEQ ID NO: 114 - protein, 1298 aa, Homo sapiens
  Amino acid sequence of HER3
QYQTLYKLYERCEVVMGNLEIVLTGHNADLSFLQWIREVTGYVLVAMNEFSTLPLPNLRVVRGTQVYDGKFAIFVMLNYNTNSSHALRQLRLTQLTEILSGGVYIEKNDKLCHMDTIDWRDIVRDRDAEIVVKDNGRSCPPCHEVCKGRCWGPGSEDCQTLTKTICAPQCNGHCFGPNPNQCCHDECAGGCSGPQDTDCFACRHFNDSGACVPRCPQPLVYNKLTFQLEPNPHTKYQYGGVCVASCPHNFVVDQTSCVRACPPDKMEVDKNGLKMCEPCGGLCPKACEGTGSGSRFQTVDSSNIDGFVNCTKILGNLDFLITGLNGDPWHKIPALDPEKLNVFRTVREITGYLNIQSWPPHMHNFSVFSNLTTIGGRSLYNRGFSLLIMKNLNVTSLGFRSLKEISAGRIYISANRQLCYHHSLNWTKVLRGPTEERLDIKHNRPRRDCVAEGKVCDPLCSSGGCWGPGPGQCLSCRNYSRGGVCVTHCNFLNGEPREFAHEAECFSCHPECQPMEGTATCNGSGSDTCAQCAHFRDGPHCVSSCPHGVLGAKGPIYKYPDVQNECRPCHENCTQGCKGPELQDCLGQTLVLIGKTHLTMALTVIAGLVVIFMMLGGTFLYWRGRRIQNKRAMRRYLERGESIEPLDPSEKANKVLARIFKETELRKLKVLGSGVFGTVHKGVWIPEGESIKIPVCIKVIEDKSGRQSFQAVTDHMLAIGSLDHAHIVRLLGLCPGSSLQLVTQYLPLGSLLDHVRQHRGALGPQLLLNWGVQIAKGMYYLEEHGMVHRNLAARNVLLKSPSQVQVADFGVADLLPPDDKQLLYSEAKTPIKWMALESIHFGKYTHQSDVWSYGVTVWELMTFGAEPYAGLRLAEVPDLLEKGERLAQPQICTIDVYMVMVKCWMIDENIRPTFKELANEFTRMARDPPRYLVIKRESGPGIAPGPEPHGLTNKKLEEVELEPELDLDLDLEAEEDNLATTTLGSALSLPVGTLNRPRGSQSLLSPSSGYMPMNQGNLGESCQESAVSGSSERCPRPVSLHPMPRGCLASESSEGHVTGSEAELQEKVSMCRSRSRSRSPRPRGDSAYHSQRHSLLTPVTPLSPPGLEEEDVNGYVMPDTHLKGTPSSREGTLSSVGLSSVLGTEEEDEDEEYEYMNRRRRHSPPHPPRPSSLEELGYEYMDVGSDLSASLGSTQSCPLHPVPIMPTAGTTPDEDYEYMNRQRDGGGPGGDYAAMGACPASEQGYEEMRAFQGPGHQAPHVHYARLKTLRSLEATDSAFDNPDYWHSRLFPKANAQRT

SEQ ID NO: 115 - DNA, 3927 bp, Homo sapiens
  Coding sequence for ERBB4
atgaagccggcgacaggactttgggtctgggtgagccttctcgtggcggcggggaccgtccagcccagcgattctcagtcagtgtgtgcaggaacggagaataaactgagctctctctctgacctggaacagcagtaccgagccttgcgcaagtactatgaaaactgtgaggttgtcatgggcaacctggagataaccagcattgagcacaaccgggacctctccttcctgcggtctgttcgagaagtcacaggctacgtgttagtggctcttaatcagtttcgttacctgcctctggagaatttacgcattattcgtgggacaaaactttatgaggatcgatatgccttggcaatatttttaaactacagaaaagatggaaactttggacttcaagaacttggattaaagaacttgacagaaatcctaaatggtggagtctatgtagaccagaacaaattcctttgttatgcagacaccattcattggcaagatattgttcggaacccatggccttccaacttgactcttgtgtcaacaaatggtagttcaggatgtggacgttgccataagtcctgtactggccgttgctggggacccacagaaaatcattgccagactttgacaaggacggtgtgtgcagaacaatgtgacggcagatgctacggaccttacgtcagtgactgctgccatcgagaatgtgctggaggctgctcaggacctaaggacacagactgctttgcctgcatgaatttcaatgacagtggagcatgtgttactcagtgtccccaaacctttgtctacaatccaaccacctttcaactggagcacaatttcaatgcaaagtacacatatggagcattctgtgtcaagaaatgtccacataactttgtggtagattccagttcttgtgtgcgtgcctgccctagttccaagatggaagtagaagaaaatgggattaaaatgtgtaaaccttgcactgacatttgcccaaaagcttgtgatggcattggcacaggatcattgatgtcagctcagactgtggattccagtaacattgacaaattcataaactgtaccaagatcaatgggaatttgatctttctagtcactggtattcatggggacccttacaatgcaattgaagccatagacccagagaaactgaacgtctttcggacagtcagagagataacaggtttcctgaacatacagtcatggccaccaaacatgactgacttcagtgttttttctaacctggtgaccattggtggaagagtactctatagtggcctgtccttgcttatcctcaagcaacagggcatcacctctctacagttccagtccctgaaggaaatcagcgcaggaaacatctatattactgacaacagcaacctgtgttattatcataccattaactggacaacactcttcagcacaatcaaccagagaatagtaatccgggacaacagaaaagctgaaaattgtactgctgaaggaatggtgtgcaaccatctgtgttccagtgatggctgttggggacctgggccagaccaatgtctgtcgtgtcgccgcttcagtagaggaaggatctgcatagagtcttgtaacctctatgatggtgaatttcgggagtttgagaatggctccatctgtgtggagtgtgacccccagtgtgagaagatggaagatggcctcctcacatgccatggaccgggtcctgacaactgtacaaagtgctctcattttaaagatggcccaaactgtgtggaaaaatgtccagatggcttacagggggcaaacagtttcattttcaagtatgctgatccagatcgggagtgccacccatgccatccaaactgcacccaagggtgtaacggtcccactagtcatgactgcatttactacccatggacgggccattccactttaccacaacatgctagaactcccctgattgcagctggagtaattggtgggctcttcattctggtcattgtgggtctgacatttgctgtttatgttagaaggaagagcatcaaaaagaaaagagccttgagaagattcttggaaacagagttggtggaaccattaactcccagtggcacagcacccaatcaagctcaacttcgtattttgaaagaaactgagctgaagagggtaaaagtccttggctcaggtgcttttggaacggtttataaaggtatttgggtacctgaaggagaaactgtgaagattcctgtggctattaagattcttaatgagacaactggtcccaaggcaaatgtggagttcatggatgaagctctgatcatggcaagtatggatcatccacacctagtccggttgctgggtgtgtgtctgagcccaaccatccagctggttactcaacttatgccccatggctgcctgttggagtatgtccacgagcacaaggataacattggatcacaactgctgcttaactggtgtgtccagatagctaagggaatgatgtacctggaagaaagacgactcgttcatcgggatttggcagcccgtaatgtcttagtgaaatctccaaaccatgtgaaaatcacagattttgggctagccagactcttggaaggagatgaaaaagagtacaatgctgatggaggaaagatgccaattaaatggatggctctggagtgtatacattacaggaaattcacccatcagagtgacgtttggagctatggagttactatatgggaactgatgacctttggaggaaaaccctatgatggaattccaacgcgagaaatccctgatttattagagaaaggagaacgtttgcctcagcctcccatctgcactattgacgtttacatggtcatggtcaaatgttggatgattgatgctgacagtagacctaaatttaaggaactggctgctgagttttcaaggatggctcgagaccctcaaagatacctagttattcagggtgatgatcgtatgaagcttcccagtccaaatgacagcaagttctttcagaatctcttggatgaagaggatttggaagatatgatggatgctgaggagtacttggtccctcaggctttcaacatcccacctcccatctatacttccagagcaagaattgactcgaataggagtgaaattggacacagccctcctcctgcctacacccccatgtcaggaaaccagtttgtataccgagatggaggttttgctgctgaacaaggagtgtctgtgccctacagagccccaactagcacaattccagaagctcctgtggcacagggtgctactgctgagatttttgatgactcctgctgtaatggcaccctacgcaagccagtggcaccccatgtccaagaggacagtagcacccagaggtacagtgctgaccccaccgtgtttgccccagaacggagcccacgaggagagctggatgaggaaggttacatgactcctatgcgagacaaacccaaacaagaatacctgaatccagtggaggagaacccttttgtttctcggagaaaaaatggagaccttcaagcattggataatcccgaatatcacaatgcatccaatggtccacccaaggccgaggatgagtatgtgaatgagccactgtacctcaacacctttgccaacaccttgggaaaagctgagtacctgaagaacaacatactgtcaatgccagagaaggccaagaaagcgtttgacaaccctgactactggaaccacagcctgccacctcggagcacccttcagcacccagactacctgcaggagtacagcacaaaatatttttataaacagaatgggcggatccggcctattgtggcagagaatcctgaatacctctctgagttctccctgaagccaggcactgtgctgccgcctccaccttacagacaccggaatactgtggtgtaa

SEQ ID NO: 116 - protein, 1308 aa, Homo sapiens
  Amino acid sequence of HER4
MKPATGLWVWVSLLVAAGTVQPSDSQSVCAGTENKLSSLSDLEQQYRALRKYYENCEVVMGNLEITSIEHNRDLSFLRSVREVTGYVLVALNQFRYLPLENLRIIRGTKLYEDRYALAIFLNYRKDGNFGLQELGLKNLTEILNGGVYVDQNKFLCYADTIHWQDIVRNPWPSNLTLVSTNGSSGCGRCHKSCTGRCWGPTENHCQTLTRTVCAEQCDGRCYGPYVSDCCHRECAGGCSGPKDTDCFACMNFNDSGACVTQCPQTFVYNPTTFQLEHNFNAKYTYGAFCVKKCPHNFVVDSSSCVRACPSSKMEVEENGIKMCKPCTDICPKACDGIGTGSLMSAQTVDSSNIDKFINCTKINGNLIFLVTGIHGDPYNAIEAIDPEKLNVFRTVREITGFLNIQSWPPNMTDFSVFSNLVTIGGRVLYSGLSLLILKQQGITSLQFQSLKEISAGNIYITDNSNLCYYHTINWTTLFSTINQRIVIRDNRKAENCTAEGMVCNHLCSSDGCWGPGPDQCLSCRRFSRGRICIESCNLYDGEFREFENGSICVECDPQCEKMEDGLLTCHGPGPDNCTKCSHFKDGPNCVEKCPDGLQGANSFIFKYADPDRECHPCHPNCTQGCNGPTSHDCIYYPWTGHSTLPQHARTPLIAAGVIGGLFILVIVGLTFAVYVRRKSIKKKRALRRFLETELVEPLTPSGTAPNQAQLRILKETELKRVKVLGSGAFGTVYKGIWVPEGETVKIPVAIKILNETTGPKANVEFMDEALIMASMDHPHLVRLLGVCLSPTIQLVTQLMPHGCLLEYVHEHKDNIGSQLLLNWCVQIAKGMMYLEERRLVHRDLAARNVLVKSPNHVKITDFGLARLLEGDEKEYNADGGKMPIKWMALECIHYRKFTHQSDVWSYGVTIWELMTFGGKPYDGIPTREIPDLLEKGERLPQPPICTIDVYMVMVKCWMIDADSRPKFKELAAEFSRMARDPQRYLVIQGDDRMKLPSPNDSKFFQNLLDEEDLEDMMDAEEYLVPQAFNIPPPIYTSRARIDSNRSEIGHSPPPAYTPMSGNQFVYRDGGFAAEQGVSVPYRAPTSTIPEAPVAQGATAEIFDDSCCNGTLRKPVAPHVQEDSSTQRYSADPTVFAPERSPRGELDEEGYMTPMRDKPKQEYLNPVEENPFVSRRKNGDLQALDNPEYHNASNGPPKAEDEYVNEPLYLNTFANTLGKAEYLKNNILSMPEKAKKAFDNPDYWNHSLPPRSTLQHPDYLQEYSTKYFYKQNGRIRPIVAENPEYLSEFSLKPGTVLPPPPYRHRNTVV

SEQ ID NO: 117 - DNA, 4104 bp, Homo sapiens
  Coding sequence for IGF1R
atgaagtctggctccggaggagggtccccgacctcgctgtgggggctcctgtttctctccgccgcgctctcgctctggccgacgagtggagaaatctgcgggccaggcatcgacatccgcaacgactatcagcagctgaagcgcctggagaactgcacggtgatcgagggctacctccacatcctgctcatctccaaggccgaggactaccgcagctaccgcttccccaagctcacggtcattaccgagtacttgctgctgttccgagtggctggcctcgagagcctcggagacctcttccccaacctcacggtcatccgcggctggaaactcttctacaactacgccctggtcatcttcgagatgaccaatctcaaggatattgggctttacaacctgaggaacattactcggggggccatcaggattgagaaaaatgctgacctctgttacctctccactgtggactggtccctgatcctggatgcggtgtccaataactacattgtggggaataagcccccaaaggaatgtggggacctgtgtccagggaccatggaggagaagccgatgtgtgagaagaccaccatcaacaatgagtacaactaccgctgctggaccacaaaccgctgccagaaaatgtgcccaagcacgtgtgggaagcgggcgtgcaccgagaacaatgagtgctgccaccccgagtgcctgggcagctgcagcgcgcctgacaacgacacggcctgtgtagcttgccgccactactactatgccggtgtctgtgtgcctgcctgcccgcccaacacctacaggtttgagggctggcgctgtgtggaccgtgacttctgcgccaacatcctcagcgccgagagcagcgactccgaggggtttgtgatccacgacggcgagtgcatgcaggagtgcccctcgggcttcatccgcaacggcagccagagcatgtactgcatcccttgtgaaggtccttgcccgaaggtctgtgaggaagaaaagaaaacaaagaccattgattctgttacttctgctcagatgctccaaggatgcaccatcttcaagggcaatttgctcattaacatccgacgggggaataacattgcttcagagctggagaacttcatggggctcatcgaggtggtgacgggctacgtgaagatccgccattctcatgccttggtctccttgtccttcctaaaaaaccttcgcctcatcctaggagaggagcagctagaagggaattactccttctacgtcctcgacaaccagaacttgcagcaactgtgggactgggaccaccgcaacctgaccatcaaagcagggaaaatgtactttgctttcaatcccaaattatgtgtttccgaaatttaccgcatggaggaagtgacggggactaaagggcgccaaagcaaaggggacataaacaccaggaacaacggggagagagcctcctgtgaaagtgacgtcctgcatttcacctccaccaccacgtcgaagaatcgcatcatcataacctggcaccggtaccggccccctgactacagggatctcatcagcttcaccgtttactacaaggaagcaccctttaagaatgtcacagagtatgatgggcaggatgcctgcggctccaacagctggaacatggtggacgtggacctcccgcccaacaaggacgtggagcccggcatcttactacatgggctgaagccctggactcagtacgccgtttacgtcaaggctgtgaccctcaccatggtggagaacgaccatatccgtggggccaagagtgagatcttgtacattcgcaccaatgcttcagttccttccattcccttggacgttctttcagcatcgaactcctcttctcagttaatcgtgaagtggaaccctccctctctgcccaacggcaacctgagttactacattgtgcgctggcagcggcagcctcaggacggctacctttaccggcacaattactgctccaaagacaaaatccccatcaggaagtatgccgacggcaccatcgacattgaggaggtcacagagaaccccaagactgaggtgtgtggtggggagaaagggccttgctgcgcctgccccaaaactgaagccgagaagcaggccgagaaggaggaggctgaataccgcaaagtctttgagaatttcctgcacaactccatcttcgtgcccagacctgaaaggaagcggagagatgtcatgcaagtggccaacaccaccatgtccagccgaagcaggaacaccacggccgcagacacctacaacatcaccgacccggaagagctggagacagagtaccctttctttgagagcagagtggataacaaggagagaactgtcatttctaaccttcggcctttcacattgtaccgcatcgatatccacagctgcaaccacgaggctgagaagctgggctgcagcgcctccaacttcgtctttgcaaggactatgcccgcagaaggagcagatgacattcctgggccagtgacctgggagccaaggcctgaaaactccatctttttaaagtggccggaacctgagaatcccaatggattgattctaatgtatgaaataaaatacggatcacaagttgaggatcagcgagaatgtgtgtccagacaggaatacaggaagtatggaggggccaagctaaaccggctaaacccggggaactacacagcccggattcaggccacatctctctctgggaatgggtcgtggacagatcctgtgttcttctatgtccaggccaaaacaggatatgaaaacttcatccatctgatcatcgctctgcccgtcgctgtcctgttgatcgtgggagggttggtgattatgctgtacgtcttccatagaaagagaaataacagcaggctggggaatggagtgctgtatgcctctgtgaacccggagtacttcagcgctgctgatgtgtacgttcctgatgagtgggaggtggctcgggagaagatcaccatgagccgggaacttgggcaggggtcgtttgggatggtctatgaaggagttgccaagggtgtggtgaaagatgaacctgaaaccagagtggccattaaaacagtgaacgaggccgcaagcatgcgtgagaggattgagtttctcaacgaagcttctgtgatgaaggagttcaattgtcaccatgtggtgcgattgctgggtgtggtgtcccaaggccagccaacactggtcatcatggaactgatgacacggggcgatctcaaaagttatctccggtctctgaggccagaaatggagaataatccagtcctagcacctccaagcctgagcaagatgattcagatggccggagagattgcagacggcatggcatacctcaacgccaataagttcgtccacagagaccttgctgcccggaattgcatggtagccgaagatttcacagtcaaaatcggagattttggtatgacgcgagatatctatgagacagactattaccggaaaggaggcaaagggctgctgcccgtgcgctggatgtctcctgagtccctcaaggatggagtcttcaccacttactcggacgtctggtccttcggggtcgtcctctgggagatcgccacactggccgagcagccctaccagggcttgtccaacgagcaagtccttcgcttcgtcatggagggcggccttctggacaagccagacaactgtcctgacatgctgtttgaactgatgcgcatgtgctggcagtataaccccaagatgaggccttccttcctggagatcatcagcagcatcaaagaggagatggagcctggcttccgggaggtctccttctactacagcgaggagaacaagctgcccgagccggaggagctggacctggagccagagaacatggagagcgtccccctggacccctcggcctcctcgtcctccctgccactgcccgacagacactcaggacacaaggccgagaacggccccggccctggggtgctggtcctccgcgccagcttcgacgagagacagccttacgcccacatgaacgggggccgcaagaacgagcgggccttgccgctgccccagtcttcgacctgctga

SEQ ID NO: 118 - protein, 1367 aa, Homo sapiens
  Amino acid sequence of JTK13
MKSGSGGGSPTSLWGLLFLSAALSLWPTSGEICGPGIDIRNDYQQLKRLENCTVIEGYLHILLISKAEDYRSYRFPKLTVITEYLLLFRVAGLESLGDLFPNLTVIRGWKLFYNYALVIFEMTNLKDIGLYNLRNITRGAIRIEKNADLCYLSTVDWSLILDAVSNNYIVGNKPPKECGDLCPGTMEEKPMCEKTTINNEYNYRCWTTNRCQKMCPSTCGKRACTENNECCHPECLGSCSAPDNDTACVACRHYYYAGVCVPACPPNTYRFEGWRCVDRDFCANILSAESSDSEGFVIHDGECMQECPSGFIRNGSQSMYCIPCEGPCPKVCEEEKKTKTIDSVTSAQMLQGCTIFKGNLLINIRRGNNIASELENFMGLIEVVTGYVKIRHSHALVSLSFLKNLRLILGEEQLEGNYSFYVLDNQNLQQLWDWDHRNLTIKAGKMYFAFNPKLCVSEIYRMEEVTGTKGRQSKGDINTRNNGERASCESDVLHFTSTTTSKNRIIITWHRYRPPDYRDLISFTVYYKEAPFKNVTEYDGQDACGSNSWNMVDVDLPPNKDVEPGILLHGLKPWTQYAVYVKAVTLTMVENDHIRGAKSEILYIRTNASVPSIPLDVLSASNSSSQLIVKWNPPSLPNGNLSYYIVRWQRQPQDGYLYRHNYCSKDKIPIRKYADGTIDIEEVTENPKTEVCGGEKGPCCACPKTEAEKQAEKEEAEYRKVFENFLHNSIFVPRPERKRRDVMQVANTTMSSRSRNTTAADTYNITDPEELETEYPFFESRVDNKERTVISNLRPFTLYRIDIHSCNHEAEKLGCSASNFVFARTMPAEGADDIPGPVTWEPRPENSIFLKWPEPENPNGLILMYEIKYGSQVEDQRECVSRQEYRKYGGAKLNRLNPGNYTARIQATSLSGNGSWTDPVFFYVQAKTGYENFIHLIIALPVAVLLIVGGLVIMLYVFHRKRNNSRLGNGVLYASVNPEYFSAADVYVPDEWEVAREKITMSRELGQGSFGMVYEGVAKGVVKDEPETRVAIKTVNEAASMRERIEFLNEASVMKEFNCHHVVRLLGVVSQGQPTLVIMELMTRGDLKSYLRSLRPEMENNPVLAPPSLSKMIQMAGEIADGMAYLNANKFVHRDLAARNCMVAEDFTVKIGDFGMTRDIYETDYYRKGGKGLLPVRWMSPESLKDGVFTTYSDVWSFGVVLWEIATLAEQPYQGLSNEQVLRFVMEGGLLDKPDNCPDMLFELMRMCWQYNPKMRPSFLEIISSIKEEMEPGFREVSFYYSEENKLPEPEELDLEPENMESVPLDPSASSSSLPLPDRHSGHKAENGPGPGVLVLRASFDERQPYAHMNGGRKNERALPLPQSSTC

SEQ ID NO: 119 - DNA, 4149 bp, Homo sapiens
  Coding sequence for INSR
atgggcaccgggggccggcggggggcggcggccgcgccgctgctggtggcggtggccgcgctgctactgggcgccgcgggccacctgtaccccggagaggtgtgtcccggcatggatatccggaacaacctcactaggttgcatgagctggagaattgctctgtcatcgaaggacacttgcagatactcttgatgttcaaaacgaggcccgaagatttccgagacctcagtttccccaaactcatcatgatcactgattacttgctgctcttccgggtctatgggctcgagagcctgaaggacctgttccccaacctcacggtcatccggggatcacgactgttctttaactacgcgctggtcatcttcgagatggttcacctcaaggaactcggcctctacaacctgatgaacatcacccggggttctgtccgcatcgagaagaacaatgagctctgttacttggccactatcgactggtcccgtatcctggattccgtggaggataatcacatcgtgttgaacaaagatgacaacgaggagtgtggagacatctgtccgggtaccgcgaagggcaagaccaactgccccgccaccgtcatcaacgggcagtttgtcgaacgatgttggactcatagtcactgccagaaagtttgcccgaccatctgtaagtcacacggctgcaccgccgaaggcctctgttgccacagcgagtgcctgggcaactgttctcagcccgacgaccccaccaagtgcgtggcctgccgcaacttctacctggacggcaggtgtgtggagacctgcccgcccccgtactaccacttccaggactggcgctgtgtgaacttcagcttctgccaggacctgcaccacaaatgcaagaactcgcggaggcagggctgccaccaatacgtcattcacaacaacaagtgcatccctgagtgtccctccgggtacacgatgaattccagcaacttgctgtgcaccccatgcctgggtccctgtcccaaggtgtgccacctcctagaaggcgagaagaccatcgactcggtgacgtctgcccaggagctccgaggatgcaccgtcatcaacgggagtctgatcatcaacattcgaggaggcaacaatctggcagctgagctagaagccaacctcggcctcattgaagaaatttcagggtatctaaaaatccgccgatcctacgctctggtgtcactttccttcttccggaagttacgtctgattcgaggagagaccttggaaattgggaactactccttctatgccttggacaaccagaacctaaggcagctctgggactggagcaaacacaacctcaccaccactcaggggaaactcttcttccactataaccccaaactctgcttgtcagaaatccacaagatggaagaagtttcaggaaccaaggggcgccaggagagaaacgacattgccctgaagaccaatggggacaaggcatcctgtgaaaatgagttacttaaattttcttacattcggacatcttttgacaagatcttgctgagatgggagccgtactggccccccgacttccgagacctcttggggttcatgctgttctacaaagaggccccttatcagaatgtgacggagttcgatgggcaggatgcgtgtggttccaacagttggacggtggtagacattgacccacccctgaggtccaacgaccccaaatcacagaaccacccagggtggctgatgcggggtctcaagccctggacccagtatgccatctttgtgaagaccctggtcaccttttcggatgaacgccggacctatggggccaagagtgacatcatttatgtccagacagatgccaccaacccctctgtgcccctggatccaatctcagtgtctaactcatcatcccagattattctgaagtggaaaccaccctccgaccccaatggcaacatcacccactacctggttttctgggagaggcaggcggaagacagtgagctgttcgagctggattattgcctcaaagggctgaagctgccctcgaggacctggtctccaccattcgagtctgaagattctcagaagcacaaccagagtgagtatgaggattcggccggcgaatgctgctcctgtccaaagacagactctcagatcctgaaggagctggaggagtcctcgtttaggaagacgtttgaggattacctgcacaacgtggttttcgtccccagaaaaacctcttcaggcactggtgccgaggaccctaggccatctcggaaacgcaggtcccttggcgatgttgggaatgtgacggtggccgtgcccacggtggcagctttccccaacacttcctcgaccagcgtgcccacgagtccggaggagcacaggccttttgagaaggtggtgaacaaggagtcgctggtcatctccggcttgcgacacttcacgggctatcgcatcgagctgcaggcttgcaaccaggacacccctgaggaacggtgcagtgtggcagcctacgtcagtgcgaggaccatgcctgaagccaaggctgatgacattgttggccctgtgacgcatgaaatctttgagaacaacgtcgtccacttgatgtggcaggagccgaaggagcccaatggtctgatcgtgctgtatgaagtgagttatcggcgatatggtgatgaggagctgcatctctgcgtctcccgcaagcacttcgctctggaacggggctgcaggctgcgtgggctgtcaccggggaactacagcgtgcgaatccgggccacctcccttgcgggcaacggctcttggacggaacccacctatttctacgtgacagactatttagacgtcccgtcaaatattgcaaaaattatcatcggccccctcatctttgtctttctcttcagtgttgtgattggaagtatttatctattcctgagaaagaggcagccagatgggccgctgggaccgctttacgcttcttcaaaccctgagtatctcagtgccagtgatgtgtttccatgctctgtgtacgtgccggacgagtgggaggtgtctcgagagaagatcaccctccttcgagagctggggcagggctccttcggcatggtgtatgagggcaatgccagggacatcatcaagggtgaggcagagacccgcgtggcggtgaagacggtcaacgagtcagccagtctccgagagcggattgagttcctcaatgaggcctcggtcatgaagggcttcacctgccatcacgtggtgcgcctcctgggagtggtgtccaagggccagcccacgctggtggtgatggagctgatggctcacggagacctgaagagctacctccgttctctgcggccagaggctgagaataatcctggccgccctccccctacccttcaagagatgattcagatggcggcagagattgctgacgggatggcctacctgaacgccaagaagtttgtgcatcgggacctggcagcgagaaactgcatggtcgcccatgattttactgtcaaaattggagactttggaatgaccagagacatctatgaaacggattactaccggaaagggggcaagggtctgctccctgtacggtggatggcaccggagtccctgaaggatggggtcttcaccacttcttctgacatgtggtcctttggcgtggtcctttgggaaatcaccagcttggcagaacagccttaccaaggcctgtctaatgaacaggtgttgaaatttgtcatggatggagggtatctggatcaacccgacaactgtccagagagagtcactgacctcatgcgcatgtgctggcaattcaaccccaagatgaggccaaccttcctggagattgtcaacctgctcaaggacgacctgcaccccagctttccagaggtgtcgttcttccacagcgaggagaacaaggctcccgagagtgaggagctggagatggagtttgaggacatggagaatgtgcccctggaccgttcctcgcactgtcagagggaggaggcggggggccgggatggagggtcctcgctgggtttcaagcggagctacgaggaacacatcccttacacacacatgaacggaggcaagaaaaacgggcggattctgaccttgcctcggtccaatccttcctaa

SEQ ID NO: 120 - protein, 1382 aa, Homo sapiens
  Amino acid sequence of IR
MGTGGRRGAAAAPLLVAVAALLLGAAGHLYPGEVCPGMDIRNNLTRLHELENCSVIEGHLQILLMFKTRPEDFRDLSFPKLIMITDYLLLFRVYGLESLKDLFPNLTVIRGSRLFFNYALVIFEMVHLKELGLYNLMNITRGSVRIEKNNELCYLATIDWSRILDSVEDNHIVLNKDDNEECGDICPGTAKGKTNCPATVINGQFVERCWTHSHCQKVCPTICKSHGCTAEGLCCHSECLGNCSQPDDPTKCVACRNFYLDGRCVETCPPPYYHFQDWRCVNFSFCQDLHHKCKNSRRQGCHQYVIHNNKCIPECPSGYTMNSSNLLCTPCLGPCPKVCHLLEGEKTIDSVTSAQELRGCTVINGSLIINIRGGNNLAAELEANLGLIEEISGYLKIRRSYALVSLSFFRKLRLIRGETLEIGNYSFYALDNQNLRQLWDWSKHNLTTTQGKLFFHYNPKLCLSEIHKMEEVSGTKGRQERNDIALKTNGDKASCENELLKFSYIRTSFDKILLRWEPYWPPDFRDLLGFMLFYKEAPYQNVTEFDGQDACGSNSWTVVDIDPPLRSNDPKSQNHPGWLMRGLKPWTQYAIFVKTLVTFSDERRTYGAKSDIIYVQTDATNPSVPLDPISVSNSSSQIILKWKPPSDPNGNITHYLVFWERQAEDSELFELDYCLKGLKLPSRTWSPPFESEDSQKHNQSEYEDSAGECCSCPKTDSQILKELEESSFRKTFEDYLHNVVFVPRKTSSGTGAEDPRPSRKRRSLGDVGNVTVAVPTVAAFPNTSSTSVPTSPEEHRPFEKVVNKESLVISGLRHFTGYRIELQACNQDTPEERCSVAAYVSARTMPEAKADDIVGPVTHEIFENNVVHLMWQEPKEPNGLIVLYEVSYRRYGDEELHLCVSRKHFALERGCRLRGLSPGNYSVRIRATSLAGNGSWTEPTYFYVTDYLDVPSNIAKIIIGPLIFVFLFSVVIGSIYLFLRKRQPDGPLGPLYASSNPEYLSASDVFPCSVYVPDEWEVSREKITLLRELGQGSFGMVYEGNARDIIKGEAETRVAVKTVNESASLRERIEFLNEASVMKGFTCHHVVRLLGVVSKGQPTLVVMELMAHGDLKSYLRSLRPEAENNPGRPPPTLQEMIQMAAEIADGMAYLNAKKFVHRDLAARNCMVAHDFTVKIGDFGMTRDIYETDYYRKGGKGLLPVRWMAPESLKDGVFTTSSDMWSFGVVLWEITSLAEQPYQGLSNEQVLKFVMDGGYLDQPDNCPERVTDLMRMCWQFNPKMRPTFLEIVNLLKDDLHPSFPEVSFFHSEENKAPESEELEMEFEDMENVPLDRSSHCQREEAGGRDGGSSLGFKRSYEEHIPYTHMNGGKKNGRILTLPRSNPS

SEQ ID NO: 121 - DNA, 3894 bp, Homo sapiens
  Coding sequence for INSRR
atggcagtgcctagtctgtggccctggggagcatgcctgcctgtgatcttcctctccttgggatttggcctggatacagtagaggtgtgccccagcctggatattcgctcagaggtggcagagcttcgtcagctggagaactgcagcgtggtggagggccacctgcagatcctgctcatgttcacagccaccggggaggacttccgcggcctcagcttccctcgcctcacccaggtcaccgactacctgctgctcttccgtgtctacggactggagagcctgcgcgacctcttccccaacctagcagtcatccgcgggacgcgcctcttcctgggctatgcactggtcatctttgagatgccacatctgcgtgacgtggcactgcctgcacttggggccgtgctgcgtggggctgtgcgtgtggagaagaaccaggagctctgccacctctccaccattgactggggactgctgcagccagcacctggcgccaaccacatcgtgggcaacaagctgggcgaggagtgtgctgacgtgtgccctggtgtgctgggtgctgctggtgagccctgtgccaagaccaccttcagcgggcacactgactacagatgctggacctccagccactgccagagagtgtgcccctgcccccatgggatggcttgcacagcgaggggcgagtgctgccacaccgaatgcctggggggctgcagccagccagaagaccctcgtgcctgtgtagcttgccgccacctctacttccagggtgcctgcctgtgggcctgcccgccaggcacctaccagtatgagtcctggcgctgtgtcacagctgagcgctgtgccagcctgcactctgtgcccggccgtgcctccaccttcggcatacaccagggcagttgcctggcccagtgcccttctggcttcacccgtaatagcagcagcatattctgccacaagtgcgaggggctgtgccctaaagagtgcaaggtaggcaccaagaccatcgactccatccaggcggcacaggatcttgtgggctgcacgcatgtggagggaagcctcatcctcaaccttcgccagggctacaacctggagccacagctgcagcacagcctggggctggtagaaaccattactggcttcctcaaaatcaagcactcctttgccctcgtgtccctgggctttttcaagaacctcaaactaatccggggagacgccatggtggatgggaactacactctctacgtgctggacaaccagaacctacaacagctagggtcctgggtggccgcggggctcaccattcccgtgggcaagatctacttcgccttcaacccgcgcctctgcttggaacacatctaccgactggaggaggtgacaggcacgcgaggtcggcagaacaaggctgagatcaacccccgcaccaacggagaccgcgccgcctgccagactcgcaccctgcgcttcgtgtccaacgtgacggaggcagaccgcatcctgctacgctgggagcgctatgagccactggaggcccgcgacctgctcagcttcatcgtgtactacaaggagtccccattccagaacgccacagagcacgtgggtccagatgcttgtggaacccagagctggaacctgctggatgtggagctgcccctaagccgcacccaggagccaggggtgaccctagcctccctcaagccttggacacagtacgcagtgtttgtgcgggccatcacgctaaccactgaggaggacagccctcatcaaggagcccagagtcccatcgtctacctccgaacgctgcctgcagctcccacggtgccccaagacgtcatctccacgtccaactcctcctcccacctcctggtgcgctggaagccaccgacccagcgcaatgggaacctcacctactacctggtgctgtggcagcggctggcagaggacggcgacctctacctcaatgactactgccaccgcggcttgcggctgcccaccagcaacaacgatccgcgcttcgacggcgaagacggggatcctgaggccgagatggagtccgactgctgcccttgccagcacccacctcctggtcaggttctgcccccgctggaggcgcaagaggcctcgttccagaagaagtttgaaaactttctacacaacgcgatcaccatccccatatccccttggaaggtgacgtccatcaacaagagcccccaaagggactcagggcggcaccgccgggcagctgggcccctccggctggggggcaacagctcggatttcgagatccaggaggacaaggtgccccgtgagcgagcggtgctgagcggcctgcgccacttcacggaataccggatcgacatccatgcctgcaaccacgcggcgcacaccgtgggctgcagcgccgccaccttcgtctttgcgcgcaccatgccccacagagaggctgatggtattccaggaaaggtggcctgggaggcctccagcaagaacagtgtccttctgcgctggctcgagccaccagaccccaacggactcatcctcaagtacgaaatcaagtaccgccgcttgggagaggaggccacagtgctgtgtgtgtcccgtcttcgatatgcgaagtttgggggagtccacctggccctgctgccccctggaaactactctgccagggttagggcaacctcactggctggcaatggctcttggacagacagtgttgccttctacatccttggcccagaggaggaggatgctggggggctgcatgtcctcctcactgccacccctgtggggctcacgctgctcatcgttcttgctgcccttggtttcttctacggcaagaagagaaacagaaccctgtatgcttctgtgaatccagagtacttcagcgcctctgatatgtatgtccctgatgaatgggaggtgcctcgggagcagatctcgataatccgggaactgggccagggctcttttgggatggtatatgaggggctggcacgaggacttgaggctggagaggagtccacacccgtggccctgaagacggtgaatgagctggccagcccacgggaatgcattgagttcctcaaggaagcttctgtcatgaaagccttcaagtgtcaccatgtggtgcgtctcctgggtgtggtatctcagggccagccaactctggtcatcatggagttaatgacccgtggggacctcaagagccatcttcgatctttgcggcctgaggcagagaacaaccctgggctcccacagccagcattgggggaaatgatccaaatggctggtgagattgcagacggcatggcctaccttgctgccaacaagtttgtgcaccgagatctagcagcccgcaactgcatggtgtcccaggacttcaccgtcaagatcggggacttcgggatgactcgggacgtgtatgagacagactattaccgcaagggtgggaaggggctgctgcccgtgcgctggatggcccccgagtccctcaaagatgggatcttcaccacccactcggatgtctggtcctttggcgtggtactctgggagattgtgaccctggcagaacaaccctaccagggcctgtccaatgagcaggtgctgaagttcgtcatggatggcggggtcctggaggagctggagggctgtccccttcagctgcaggagctgatgagccgctgctggcagccgaacccacgcctgcgcccatctttcacacacattctggacagcatacaggaggagctgcggccctccttccgcctcctctccttctactacagcccggaatgccggggggcccggggctccctgcctaccaccgatgcagagcctgactcctcacccactccaagagactgcagccctcaaaatgggggtccagggcactga

SEQ ID NO: 122 - protein, 1297 aa, Homo sapiens
  Amino acid sequence of IRR
MAVPSLWPWGACLPVIFLSLGFGLDTVEVCPSLDIRSEVAELRQLENCSVVEGHLQILLMFTATGEDFRGLSFPRLTQVTDYLLLFRVYGLESLRDLFPNLAVIRGTRLFLGYALVIFEMPHLRDVALPALGAVLRGAVRVEKNQELCHLSTIDWGLLQPAPGANHIVGNKLGEECADVCPGVLGAAGEPCAKTTFSGHTDYRCWTSSHCQRVCPCPHGMACTARGECCHTECLGGCSQPEDPRACVACRHLYFQGACLWACPPGTYQYESWRCVTAERCASLHSVPGRASTFGIHQGSCLAQCPSGFTRNSSSIFCHKCEGLCPKECKVGTKTIDSIQAAQDLVGCTHVEGSLILNLRQGYNLEPQLQHSLGLVETITGFLKIKHSFALVSLGFFKNLKLIRGDAMVDGNYTLYVLDNQNLQQLGSWVAAGLTIPVGKIYFAFNPRLCLEHIYRLEEVTGTRGRQNKAEINPRTNGDRAACQTRTLRFVSNVTEADRILLRWERYEPLEARDLLSFIVYYKESPFQNATEHVGPDACGTQSWNLLDVELPLSRTQEPGVTLASLKPWTQYAVFVRAITLTTEEDSPHQGAQSPIVYLRTLPAAPTVPQDVISTSNSSSHLLVRWKPPTQRNGNLTYYLVLWQRLAEDGDLYLNDYCHRGLRLPTSNNDPRFDGEDGDPEAEMESDCCPCQHPPPGQVLPPLEAQEASFQKKFENFLHNAITIPISPWKVTSINKSPQRDSGRHRRAAGPLRLGGNSSDFEIQEDKVPRERAVLSGLRHFTEYRIDIHACNHAAHTVGCSAATFVFARTMPHREADGIPGKVAWEASSKNSVLLRWLEPPDPNGLILKYEIKYRRLGEEATVLCVSRLRYAKFGGVHLALLPPGNYSARVRATSLAGNGSWTDSVAFYILGPEEEDAGGLHVLLTATPVGLTLLIVLAALGFFYGKKRNRTLYASVNPEYFSASDMYVPDEWEVPREQISIIRELGQGSFGMVYEGLARGLEAGEESTPVALKTVNELASPRECIEFLKEASVMKAFKCHHVVRLLGVVSQGQPTLVIMELMTRGDLKSHLRSLRPEAENNPGLPQPALGEMIQMAGEIADGMAYLAANKFVHRDLAARNCMVSQDFTVKIGDFGMTRDVYETDYYRKGGKGLLPVRWMAPESLKDGIFTTHSDVWSFGVVLWEIVTLAEQPYQGLSNEQVLKFVMDGGVLEELEGCPLQLQELMSRCWQPNPRLRPSFTHILDSIQEELRPSFRLLSFYYSPECRGARGSLPTTDAEPDSSPTPRDCSPQNGGPGH

SEQ ID NO: 123 - DNA, 2982 bp, Homo sapiens
  Coding sequence for FLT3
atgccggcgttggcgcgcgacgcgggcaccgtgccgctgctcgttgttttttctgcaatgatatttgggactattacaaatcaagatctgcctgtgatcaagtgtgttttaatcaatcataagaacaatgattcatcagtggggaagtcatcatcatatcccatggtatcagaatccccggaagacctcgggtgtgcgttgagaccccagagctcagggacagtgtacgaagctgccgctgtggaagtggatgtatctgcttccatcacactgcaagtgctggtcgatgccccagggaacatttcctgtctctgggtctttaagcacagctccctgaattgccagccacattttgatttacaaaacagaggagttgtttccatggtcattttgaaaatgacagaaacccaagctggagaatacctactttttattcagagtgaagctaccaattacacaatattgtttacagtgagtataagaaataccctgctttacacattaagaagaccttactttagaaaaatggaaaaccaggacgccctggtctgcatatctgagagcgttccagagccgatcgtggaatgggtgctttgcgattcacagggggaaagctgtaaagaagaaagtccagctgttgttaaaaaggaggaaaaagtgcttcatgaattatttgggacggacataaggtgctgtgccagaaatgaactgggcagggaatgcaccaggctgttcacaatagatctaaatcaaactcctcagaccacattgccacaattatttcttaaagtaggggaacccttatggataaggtgcaaagctgttcatgtgaaccatggattcgggctcacctgggaattagaaaacaaagcactcgaggagggcaactactttgagatgagtacctattcaacaaacagaactatgatacggattctgtttgcttttgtatcatcagtggcaagaaacgacaccggatactacacttgttcctcttcaaagcatcccagtcaatcagctttggttaccatcgtaggaaagggatttataaatgctaccaattcaagtgaagattatgaaattgaccaatatgaagagttttgtttttctgtcaggtttaaagcctacccacaaatcagatgtacgtggaccttctctcgaaaatcatttccttgtgagcaaaagggtcttgataacggatacagcatatccaagttttgcaatcataagcaccagccaggagaatatatattccatgcagaaaatgatgatgcccaatttaccaaaatgttcacgctgaatataagaaggaaacctcaagtgctcgcagaagcatcggcaagtcaggcgtcctgtttctcggatggatacccattaccatcttggacctggaagaagtgttcagacaagtctcccaactgcacagaagagatcacagaaggagtctggaatagaaaggctaacagaaaagtgtttggacagtgggtgtcgagcagtactctaaacatgagtgaagccataaaagggttcctggtcaagtgctgtgcatacaattcccttggcacatcttgtgagacgatccttttaaactctccaggccccttccctttcatccaagacaacatctcattctatgcaacaattggtgtttgtctcctcttcattgtcgttttaaccctgctaatttgtcacaagtacaaaaagcaatttaggtatgaaagccagctacagatggtacaggtgaccggctcctcagataatgagtacttctacgttgatttcagagaatatgaatatgatctcaaatgggagtttccaagagaaaatttagagtttgggaaggtactaggatcaggtgcttttggaaaagtgatgaacgcaacagcttatggaattagcaaaacaggagtctcaatccaggttgccgtcaaaatgctgaaagaaaaagcagacagctctgaaagagaggcactcatgtcagaactcaagatgatgacccagctgggaagccacgagaatattgtgaacctgctgggggcgtgcacactgtcaggaccaatttacttgatttttgaatactgttgctatggtgatcttctcaactatctaagaagtaaaagagaaaaatttcacaggacttggacagagattttcaaggaacacaatttcagtttttaccccactttccaatcacatccaaattccagcatgcctggttcaagagaagttcagatacacccggactcggatcaaatctcagggcttcatgggaattcatttcactctgaagatgaaattgaatatgaaaaccaaaaaaggctggaagaagaggaggacttgaatgtgcttacatttgaagatcttctttgctttgcatatcaagttgccaaaggaatggaatttctggaatttaagtcgtgtgttcacagagacctggccgccaggaacgtgcttgtcacccacgggaaagtggtgaagatatgtgactttggattggctcgagatatcatgagtgattccaactatgttgtcaggggcaatgcccgtctgcctgtaaaatggatggcccccgaaagcctgtttgaaggcatctacaccattaagagtgatgtctggtcatatggaatattactgtgggaaatcttctcacttggtgtgaatccttaccctggcattccggttgatgctaacttctacaaactgattcaaaatggatttaaaatggatcagccattttatgctacagaagaaatatacattataatgcaatcctgctgggcttttgactcaaggaaacggccatccttccctaatttgacttcgtttttaggatgtcagctggcagatgcagaagaagcgatgtatcagaatgtggatggccgtgtttcggaatgtcctcacacctaccaaaacaggcgacctttcagcagagagatggatttggggctactctctccgcaggctcaggtcgaagattcgtag

SEQ ID NO: 124 - protein, 993 aa, Homo sapiens
  Amino acid sequence of FLK2
MPALARDAGTVPLLVVFSAMIFGTITNQDLPVIKCVLINHKNNDSSVGKSSSYPMVSESPEDLGCALRPQSSGTVYEAAAVEVDVSASITLQVLVDAPGNISCLWVFKHSSLNCQPHFDLQNRGVVSMVILKMTETQAGEYLLFIQSEATNYTILFTVSIRNTLLYTLRRPYFRKMENQDALVCISESVPEPIVEWVLCDSQGESCKEESPAVVKKEEKVLHELFGTDIRCCARNELGRECTRLFTIDLNQTPQTTLPQLFLKVGEPLWIRCKAVHVNHGFGLTWELENKALEEGNYFEMSTYSTNRTMIRILFAFVSSVARNDTGYYTCSSSKHPSQSALVTIVGKGFINATNSSEDYEIDQYEEFCFSVRFKAYPQIRCTWTFSRKSFPCEQKGLDNGYSISKFCNHKHQPGEYIFHAENDDAQFTKMFTLNIRRKPQVLAEASASQASCFSDGYPLPSWTWKKCSDKSPNCTEEITEGVWNRKANRKVFGQWVSSSTLNMSEAIKGFLVKCCAYNSLGTSCETILLNSPGPFPFIQDNISFYATIGVCLLFIVVLTLLICHKYKKQFRYESQLQMVQVTGSSDNEYFYVDFREYEYDLKWEFPRENLEFGKVLGSGAFGKVMNATAYGISKTGVSIQVAVKMLKEKADSSEREALMSELKMMTQLGSHENIVNLLGACTLSGPIYLIFEYCCYGDLLNYLRSKREKFHRTWTEIFKEHNFSFYPTFQSHPNSSMPGSREVQIHPDSDQISGLHGNSFHSEDEIEYENQKRLEEEEDLNVLTFEDLLCFAYQVAKGMEFLEFKSCVHRDLAARNVLVTHGKVVKICDFGLARDIMSDSNYVVRGNARLPVKWMAPESLFEGIYTIKSDVWSYGILLWEIFSLGVNPYPGIPVDANFYKLIQNGFKMDQPFYATEEIYIIMQSCWAFDSRKRPSFPNLTSFLGCQLADAEEAMYQNVDGRVSECPHTYQNRRPFSREMDLGLLSPQAQVEDS

SEQ ID NO: 125 - DNA, 2919 bp, Homo sapiens
  Coding sequence for CSF1R
atgggcccaggagttctgctgctcctgctggtggccacagcttggcatggtcagggaatcccagtgatagagcccagtgtccctgagctggtcgtgaagccaggagcaacggtgaccttgcgatgtgtgggcaatggcagcgtggaatgggatggccccccatcacctcactggaccctgtactctgatggctccagcagcatcctcagcaccaacaacgctaccttccaaaacacggggacctatcgctgcactgagcctggagaccccctgggaggcagcgccgccatccacctctatgtcaaagaccctgcccggccctggaacgtgctagcacaggaggtggtcgtgttcgaggaccaggacgcactactgccctgtctgctcacagacccggtgctggaagcaggcgtctcgctggtgcgtgtgcgtggccggcccctcatgcgccacaccaactactccttctcgccctggcatggcttcaccatccacagggccaagttcattcagagccaggactatcaatgcagtgccctgatgggtggcaggaaggtgatgtccatcagcatccggctgaaagtgcagaaagtcatcccagggcccccagccttgacactggtgcctgcagagctggtgcggattcgaggggaggctgcccagatcgtgtgctcagccagcagcgttgatgttaactttgatgtcttcctccaacacaacaacaccaagctcgcaatccctcaacaatctgactttcataataaccgttaccaaaaagtcctgaccctcaacctcgatcaagtagatttccaacatgccggcaactactcctgcgtggccagcaacgtgcagggcaagcactccacctccatgttcttccgggtggtagagagtgcctacttgaacttgagctctgagcagaacctcatccaggaggtgaccgtgggggaggggctcaacctcaaagtcatggtggaggcctacccaggcctgcaaggttttaactggacctacctgggacccttttctgaccaccagcctgagcccaagcttgctaatgctaccaccaaggacacatacaggcacaccttcaccctctctctgccccgcctgaagccctctgaggctggccgctactccttcctggccagaaacccaggaggctggagagctctgacgtttgagctcacccttcgataccccccagaggtaagcgtcatatggacattcatcaacggctctggcacccttttgtgtgctgcctctgggtacccccagcccaacgtgacatggctgcagtgcagtggccacactgataggtgtgatgaggcccaagtgctgcaggtctgggatgacccataccctgaggtcctgagccaggagcccttccacaaggtgacggtgcagagcctgctgactgttgagaccttagagcacaaccaaacctacgagtgcagggcccacaacagcgtggggagtggctcctgggccttcatacccatctctgcaggagcccacacgcatcccccggatgagttcctcttcacaccagtggtggtcgcctgcatgtccatcatggccttgctgctgctgctgctcctgctgctattgtacaagtataagcagaagcccaagtaccaggtccgctggaagatcatcgagagctatgagggcaacagttatactttcatcgaccccacgcagctgccttacaacgagaagtgggagttcccccggaacaacctgcagtttggtaagaccctcggagctggagcctttgggaaggtggtggaggccacggcctttggtctgggcaaggaggatgctgtcctgaaggtggctgtgaagatgctgaagtccacggcccatgctgatgagaaggaggccctcatgtccgagctgaagatcatgagccacctgggccagcacgagaacatcgtcaaccttctgggagcctgtacccatggaggccctgtactggtcatcacggagtactgttgctatggcgacctgctcaactttctgcgaaggaaggctgaggccatgctgggacccagcctgagccccggccaggaccccgagggaggcgtcgactataagaacatccacctcgagaagaaatatgtccgcagggacagtggcttctccagccagggtgtggacacctatgtggagatgaggcctgtctccacttcttcaaatgactccttctctgagcaagacctggacaaggaggatggacggcccctggagctccgggacctgcttcacttctccagccaagtagcccagggcatggccttcctcgcttccaagaattgcatccaccgggacgtggcagcgcgtaacgtgctgttgaccaatggtcatgtggccaagattggggacttcgggctggctagggacatcatgaatgactccaactacattgtcaagggcaatgcccgcctgcctgtgaagtggatggccccagagagcatctttgactgtgtctacacggttcagagcgacgtctggtcctatggcatcctcctctgggagatcttctcacttgggctgaatccctaccctggcatcctggtgaacagcaagttctataaactggtgaaggatggataccaaatggcccagcctgcatttgccccaaagaatatatacagcatcatgcaggcctgctgggccttggagcccacccacagacccaccttccagcagatctgctccttccttcaggagcaggcccaagaggacaggagagagcgggactataccaatctgccgagcagcagcagaagcggtggcagcggcagcagcagcagtgagctggaggaggagagctctagtgagcacctgacctgctgcgagcaaggggatatcgcccagcccttgctgcagcccaacaactatcagttctgctga

SEQ ID NO: 126 - protein, 972 aa, Homo sapiens
  Amino acid sequence of FMS
MGPGVLLLLLVATAWHGQGIPVIEPSVPELVVKPGATVTLRCVGNGSVEWDGPPSPHWTLYSDGSSSILSTNNATFQNTGTYRCTEPGDPLGGSAAIHLYVKDPARPWNVLAQEVVVFEDQDALLPCLLTDPVLEAGVSLVRVRGRPLMRHTNYSFSPWHGFTIHRAKFIQSQDYQCSALMGGRKVMSISIRLKVQKVIPGPPALTLVPAELVRIRGEAAQIVCSASSVDVNFDVFLQHNNTKLAIPQQSDFHNNRYQKVLTLNLDQVDFQHAGNYSCVASNVQGKHSTSMFFRVVESAYLNLSSEQNLIQEVTVGEGLNLKVMVEAYPGLQGFNWTYLGPFSDHQPEPKLANATTKDTYRHTFTLSLPRLKPSEAGRYSFLARNPGGWRALTFELTLRYPPEVSVIWTFINGSGTLLCAASGYPQPNVTWLQCSGHTDRCDEAQVLQVWDDPYPEVLSQEPFHKVTVQSLLTVETLEHNQTYECRAHNSVGSGSWAFIPISAGAHTHPPDEFLFTPVVVACMSIMALLLLLLLLLLYKYKQKPKYQVRWKIIESYEGNSYTFIDPTQLPYNEKWEFPRNNLQFGKTLGAGAFGKVVEATAFGLGKEDAVLKVAVKMLKSTAHADEKEALMSELKIMSHLGQHENIVNLLGACTHGGPVLVITEYCCYGDLLNFLRRKAEAMLGPSLSPGQDPEGGVDYKNIHLEKKYVRRDSGFSSQGVDTYVEMRPVSTSSNDSFSEQDLDKEDGRPLELRDLLHFSSQVAQGMAFLASKNCIHRDVAARNVLLTNGHVAKIGDFGLARDIMNDSNYIVKGNARLPVKWMAPESIFDCVYTVQSDVWSYGILLWEIFSLGLNPYPGILVNSKFYKLVKDGYQMAQPAFAPKNIYSIMQACWALEPTHRPTFQQICSFLQEQAQEDRRERDYTNLPSSSRSGGSGSSSSELEEESSSEHLTCCEQGDIAQPLLQPNNYQFC

SEQ ID NO: 127 - DNA, 2931 bp, Homo sapiens
  Coding sequence for KIT
atgagaggcgctcgcggcgcctgggattttctctgcgttctgctcctactgcttcgcgtccagacaggctcttctcaaccatctgtgagtccaggggaaccgtctccaccatccatccatccaggaaaatcagacttaatagtccgcgtgggcgacgagattaggctgttatgcactgatccgggctttgtcaaatggacttttgagatcctggatgaaacgaatgagaataagcagaatgaatggatcacggaaaaggcagaagccaccaacaccggcaaatacacgtgcaccaacaaacacggcttaagcaattccatttatgtgtttgttagagatcctgccaagcttttccttgttgaccgctccttgtatgggaaagaagacaacgacacgctggtccgctgtcctctcacagacccagaagtgaccaattattccctcaaggggtgccaggggaagcctcttcccaaggacttgaggtttattcctgaccccaaggcgggcatcatgatcaaaagtgtgaaacgcgcctaccatcggctctgtctgcattgttctgtggaccaggagggcaagtcagtgctgtcggaaaaattcatcctgaaagtgaggccagccttcaaagctgtgcctgttgtgtctgtgtccaaagcaagctatcttcttagggaaggggaagaattcacagtgacgtgcacaataaaagatgtgtctagttctgtgtactcaacgtggaaaagagaaaacagtcagactaaactacaggagaaatataatagctggcatcacggtgacttcaattatgaacgtcaggcaacgttgactatcagttcagcgagagttaatgattctggagtgttcatgtgttatgccaataatacttttggatcagcaaatgtcacaacaaccttggaagtagtagataaaggattcattaatatcttccccatgataaacactacagtatttgtaaacgatggagaaaatgtagatttgattgttgaatatgaagcattccccaaacctgaacaccagcagtggatctatatgaacagaaccttcactgataaatgggaagattatcccaagtctgagaatgaaagtaatatcagatacgtaagtgaacttcatctaacgagattaaaaggcaccgaaggaggcacttacacattcctagtgtccaattctgacgtcaatgctgccatagcatttaatgtttatgtgaatacaaaaccagaaatcctgacttacgacaggctcgtgaatggcatgctccaatgtgtggcagcaggattcccagagcccacaatagattggtatttttgtccaggaactgagcagagatgctctgcttctgtactgccagtggatgtgcagacactaaactcatctgggccaccgtttggaaagctagtggttcagagttctatagattctagtgcattcaagcacaatggcacggttgaatgtaaggcttacaacgatgtgggcaagacttctgcctattttaactttgcatttaaaggtaacaacaaagagcaaatccatccccacaccctgttcactcctttgctgattggtttcgtaatcgtagctggcatgatgtgcattattgtgatgattctgacctacaaatatttacagaaacccatgtatgaagtacagtggaaggttgttgaggagataaatggaaacaattatgtttacatagacccaacacaacttccttatgatcacaaatgggagtttcccagaaacaggctgagttttgggaaaaccctgggtgctggagctttcgggaaggttgttgaggcaactgcttatggcttaattaagtcagatgcggccatgactgtcgctgtaaagatgctcaagccgagtgcccatttgacagaacgggaagccctcatgtctgaactcaaagtcctgagttaccttggtaatcacatgaatattgtgaatctacttggagcctgcaccattggagggcccaccctggtcattacagaatattgttgctatggtgatcttttgaattttttgagaagaaaacgtgattcatttatttgttcaaagcaggaagatcatgcagaagctgcactttataagaatcttctgcattcaaaggagtcttcctgcagcgatagtactaatgagtacatggacatgaaacctggagtttcttatgttgtcccaaccaaggccgacaaaaggagatctgtgagaataggctcatacatagaaagagatgtgactcccgccatcatggaggatgacgagttggccctagacttagaagacttgctgagcttttcttaccaggtggcaaagggcatggctttcctcgcctccaagaattgtattcacagagacttggcagccagaaatatcctccttactcatggtcggatcacaaagatttgtgattttggtctagccagagacatcaagaatgattctaattatgtggttaaaggaaacgctcgactacctgtgaagtggatggcacctgaaagcattttcaactgtgtatacacgtttgaaagtgacgtctggtcctatgggatttttctttgggagctgttctctttaggaagcagcccctatcctggaatgccggtcgattctaagttctacaagatgatcaaggaaggcttccggatgctcagccctgaacacgcacctgctgaaatgtatgacataatgaagacttgctgggatgcagatcccctaaaaagaccaacattcaagcaaattgttcagctaattgagaagcagatttcagagagcaccaatcatatttactccaacttagcaaactgcagccccaaccgacagaagcccgtggtagaccattctgtgcggatcaattctgtcggcagcaccgcttcctcctcccagcctctgcttgtgcacgacgatgtctga

SEQ ID NO: 128 - protein, 976 aa, Homo sapiens [sequence omitted]

SEQ ID NO: 129 - DNA, 3270 bp, Homo sapiens
  Coding sequence for PDGFRA
atggggacttcccatccggcgttcctggtcttaggctgtcttctcacagggctgagcctaatcctctgccagctttcattaccctctatccttccaaatgaaaatgaaaaggttgtgcagctgaattcatccttttctctgagatgctttggggagagtgaagtgagctggcagtaccccatgtctgaagaagagagctccgatgtggaaatcagaaatgaagaaaacaacagcggcctttttgtgacggtcttggaagtgagcagtgcctcggcggcccacacagggttgtacacttgctattacaaccacactcagacagaagagaatgagcttgaaggcaggcacatttacatctatgtgccagacccagatgtagcctttgtacctctaggaatgacggattatttagtcatcgtggaggatgatgattctgccattataccttgtcgcacaactgatcccgagactcctgtaaccttacacaacagtgagggggtggtacctgcctcctacgacagcagacagggctttaatgggaccttcactgtagggccctatatctgtgaggccaccgtcaaaggaaagaagttccagaccatcccatttaatgtttatgctttaaaagcaacatcagagctggatctagaaatggaagctcttaaaaccgtgtataagtcaggggaaacgattgtggtcacctgtgctgtttttaacaatgaggtggttgaccttcaatggacttaccctggagaagtgaaaggcaaaggcatcacaatgctggaagaaatcaaagtcccatccatcaaattggtgtacactttgacggtccccgaggccacggtgaaagacagtggagattacgaatgtgctgcccgccaggctaccagggaggtcaaagaaatgaagaaagtcactatttctgtccatgagaaaggtttcattgaaatcaaacccaccttcagccagttggaagctgtcaacctgcatgaagtcaaacattttgttgtagaggtgcgggcctacccacctcccaggatatcctggctgaaaaacaatctgactctgattgaaaatctcactgagatcaccactgatgtggaaaagattcaggaaataaggtatcgaagcaaattaaagctgatccgtgctaaggaagaagacagtggccattatactattgtagctcaaaatgaagatgctgtgaagagctatacttttgaactgttaactcaagttccttcatccattctggacttggtcgatgatcaccatggctcaactgggggacagacggtgaggtgcacagctgaaggcacgccgcttcctgatattgagtggatgatatgcaaagatattaagaaatgtaataatgaaacttcctggactattttggccaacaatgtctcaaacatcatcacggagatccactcccgagacaggagtaccgtggagggccgtgtgactttcgccaaagtggaggagaccatcgccgtgcgatgcctggctaagaatctccttggagctgagaaccgagagctgaagctggtggctcccaccctgcgttctgaactcacggtggctgctgcagtcctggtgctgttggtgattgtgatcatctcacttattgtcctggttgtcatttggaaacagaaaccgaggtatgaaattcgctggagggtcattgaatcaatcagcccggatggacatgaatatatttatgtggacccgatgcagctgccttatgactcaagatgggagtttccaagagatggactagtgcttggtcgggtcttggggtctggagcgtttgggaaggtggttgaaggaacagcctatggattaagccggtcccaacctgtcatgaaagttgcagtgaagatgctaaaacccacggccagatccagtgaaaaacaagctctcatgtctgaactgaagataatgactcacctggggccacatttgaacattgtaaacttgctgggagcctgcaccaagtcaggccccatttacatcatcacagagtattgcttctatggagatttggtcaactatttgcataagaatagggatagcttcctgagccaccacccagagaagccaaagaaagagctggatatctttggattgaaccctgctgatgaaagcacacggagctatgttattttatcttttgaaaacaatggtgactacatggacatgaagcaggctgatactacacagtatgtccccatgctagaaaggaaagaggtttctaaatattccgacatccagagatcactctatgatcgtccagcctcatataagaagaaatctatgttagactcagaagtcaaaaacctcctttcagatgataactcagaaggccttactttattggatttgttgagcttcacctatcaagttgcccgaggaatggagtttttggcttcaaaaaattgtgtccaccgtgatctggctgctcgcaacgtcctcctggcacaaggaaaaattgtgaagatctgtgactttggcctggccagagacatcatgcatgattcgaactatgtgtcgaaaggcagtacctttctgcccgtgaagtggatggctcctgagagcatctttgacaacctctacaccacactgagtgatgtctggtcttatggcattctgctctgggagatcttttcccttggtggcaccccttaccccggcatgatggtggattctactttctacaataagatcaagagtgggtaccggatggccaagcctgaccacgctaccagtgaagtctacgagatcatggtgaaatgctggaacagtgagccggagaagagaccctccttttaccacctgagtgagattgtggagaatctgctgcctggacaatataaaaagagttatgaaaaaattcacctggacttcctgaagagtgaccatcctgctgtggcacgcatgcgtgtggactcagacaatgcatacattggtgtcacctacaaaaacgaggaagacaagctgaaggactgggagggtggtctggatgagcagagactgagcgctgacagtggctacatcattcctctgcctgacattgaccctgtccctgaggaggaggacctgggcaagaggaacagacacagctcgcagacctctgaagagagtgccattgagacgggttccagcagttccaccttcatcaagagagaggacgagaccattgaagacatcgacatgatggacgacatcggcatagactcttcagacctggtggaagacagcttcctgtaa

SEQ ID NO: 130 - protein, 1089 aa, Homo sapiens
  Amino acid sequence of PDGFRA
MGTSHPAFLVLGCLLTGLSLILCQLSLPSILPNENEKVVQLNSSFSLRCFGESEVSWQYPMSEEESSDVEIRNEENNSGLFVTVLEVSSASAAHTGLYTCYYNHTQTEENELEGRHIYIYVPDPDVAFVPLGMTDYLVIVEDDDSAIIPCRTTDPETPVTLHNSEGVVPASYDSRQGFNGTFTVGPYICEATVKGKKFQTIPFNVYALKATSELDLEMEALKTVYKSGETIVVTCAVFNNEVVDLQWTYPGEVKGKGITMLEEIKVPSIKLVYTLTVPEATVKDSGDYECAARQATREVKEMKKVTISVHEKGFIEIKPTFSQLEAVNLHEVKHFVVEVRAYPPPRISWLKNNLTLIENLTEITTDVEKIQEIRYRSKLKLIRAKEEDSGHYTIVAQNEDAVKSYTFELLTQVPSSILDLVDDHHGSTGGQTVRCTAEGTPLPDIEWMICKDIKKCNNETSWTILANNVSNIITEIHSRDRSTVEGRVTFAKVEETIAVRCLAKNLLGAENRELKLVAPTLRSELTVAAAVLVLLVIVIISLIVLVVIWKQKPRYEIRWRVIESISPDGHEYIYVDPMQLPYDSRWEFPRDGLVLGRVLGSGAFGKVVEGTAYGLSRSQPVMKVAVKMLKPTARSSEKQALMSELKIMTHLGPHLNIVNLLGACTKSGPIYIITEYCFYGDLVNYLHKNRDSFLSHHPEKPKKELDIFGLNPADESTRSYVILSFENNGDYMDMKQADTTQYVPMLERKEVSKYSDIQRSLYDRPASYKKKSMLDSEVKNLLSDDNSEGLTLLDLLSFTYQVARGMEFLASKNCVHRDLAARNVLLAQGKIVKICDFGLARDIMHDSNYVSKGSTFLPVKWMAPESIFDNLYTTLSDVWSYGILLWEIFSLGGTPYPGMMVDSTFYNKIKSGYRMAKPDHATSEVYEIMVKCWNSEPEKRPSFYHLSEIVENLLPGQYKKSYEKIHLDFLKSDHPAVARMRVDSDNAYIGVTYKNEEDKLKDWEGGLDEQRLSADSGYIIPLPDIDPVPEEEDLGKRNRHSSQTSEESAIETGSSSSTFIKREDETIEDIDMMDDIGIDSSDLVEDSFL

SEQ ID NO: 131 - DNA, 3321 bp, Homo sapiens
  Coding sequence for PDGFRB
atgcggcttccgggtgcgatgccagctctggccctcaaaggcgagctgctgttgctgtctctcctgttacttctggaaccacagatctctcagggcctggtcgtcacacccccggggccagagcttgtcctcaatgtctccagcaccttcgttctgacctgctcgggttcagctccggtggtgtgggaacggatgtcccaggagcccccacaggaaatggccaaggcccaggatggcaccttctccagcgtgctcacactgaccaacctcactgggctagacacgggagaatacttttgcacccacaatgactcccgtggactggagaccgatgagcggaaacggctctacatctttgtgccagatcccaccgtgggcttcctccctaatgatgccgaggaactattcatctttctcacggaaataactgagatcaccattccatgccgagtaacagacccacagctggtggtgacactgcacgagaagaaaggggacgttgcactgcctgtcccctatgatcaccaacgtggcttttctggtatctttgaggacagaagctacatctgcaaaaccaccattggggacagggaggtggattctgatgcctactatgtctacagactccaggtgtcatccatcaacgtctctgtgaacgcagtgcagactgtggtccgccagggtgagaacatcaccctcatgtgcattgtgatcgggaatgaggtggtcaacttcgagtggacatacccccgcaaagaaagtgggcggctggtggagccggtgactgacttcctcttggatatgccttaccacatccgctccatcctgcacatccccagtgccgagttagaagactcggggacctacacctgcaatgtgacggagagtgtgaatgaccatcaggatgaaaaggccatcaacatcaccgtggttgagagcggctacgtgcggctcctgggagaggtgggcacactacaatttgctgagctgcatcggagccggacactgcaggtagtgttcgaggcctacccaccgcccactgtcctgtggttcaaagacaaccgcaccctgggcgactccagcgctggcgaaatcgccctgtccacgcgcaacgtgtcggagacccggtatgtgtcagagctgacactggttcgcgtgaaggtggcagaggctggccactacaccatgcgggccttccatgaggatgctgaggtccagctctccttccagctacagatcaatgtccctgtccgagtgctggagctaagtgagagccaccctgacagtggggaacagacagtccgctgtcgtggccggggcatgccccagccgaacatcatctggtctgcctgcagagacctcaaaaggtgtccacgtgagctgccgcccacgctgctggggaacagttccgaagaggagagccagctggagactaacgtgacgtactgggaggaggagcaggagtttgaggtggtgagcacactgcgtctgcagcacgtggatcggccactgtcggtgcgctgcacgctgcgcaacgctgtgggccaggacacgcaggaggtcatcgtggtgccacactccttgccctttaaggtggtggtgatctcagccatcctggccctggtggtgctcaccatcatctcccttatcatcctcatcatgctttggcagaagaagccacgttacgagatccgatggaaggtgattgagtctgtgagctctgacggccatgagtacatctacgtggaccccatgcagctgccctatgactccacgtgggagctgccgcgggaccagcttgtgctgggacgcaccctcggctctggggcctttgggcaggtggtggaggccacggctcatggcctgagccattctcaggccacgatgaaagtggccgtcaagatgcttaaatccacagcccgcagcagtgagaagcaagcccttatgtcggagctgaagatcatgagtcaccttgggccccacctgaacgtggtcaacctgttgggggcctgcaccaaaggaggacccatctatatcatcactgagtactgccgctacggagacctggtggactacctgcaccgcaacaaacacaccttcctgcagcaccactccgacaagcgccgcccgcccagcgcggagctctacagcaatgctctgcccgttgggctccccctgcccagccatgtgtccttgaccggggagagcgacggtggctacatggacatgagcaaggacgagtcggtggactatgtgcccatgctggacatgaaaggagacgtcaaatatgcagacatcgagtcctccaactacatggccccttacgataactacgttccctctgcccctgagaggacctgccgagcaactttgatcaacgagtctccagtgctaagctacatggacctcgtgggcttcagctaccaggtggccaatggcatggagtttctggcctccaagaactgcgtccacagagacctggcggctaggaacgtgctcatctgtgaaggcaagctggtcaagatctgtgactttggcctggctcgagacatcatgcgggactcgaattacatctccaaaggcagcacctttttgcctttaaagtggatggctccggagagcatcttcaacagcctctacaccaccctgagcgacgtgtggtccttcgggatcctgctctgggagatcttcaccttgggtggcaccccttacccagagctgcccatgaacgagcagttctacaatgccatcaaacggggttaccgcatggcccagcctgcccatgcctccgacgagatctatgagatcatgcagaagtgctgggaagagaagtttgagattcggccccccttctcccagctggtgctgcttctcgagagactgttgggcgaaggttacaaaaagaagtaccagcaggtggatgaggagtttctgaggagtgaccacccagccatccttcggtcccaggcccgcttgcctgggttccatggcctccgatctcccctggacaccagctccgtcctctatactgccgtgcagcccaatgagggtgacaacgactatatcatccccctgcctgaccccaaacccgaggttgctgacgagggcccactggagggttcccccagcctagccagctccaccctgaatgaagtcaacacctcctcaaccatctcctgtgacagccccctggagccccaggacgaaccagagccagagccccagcttgagctccaggtggagccggagccagagctggaacagttgccggattcggggtgccctgcgcctcgggcggaagcagaggatagcttcctgtag

SEQ ID NO: 132 - protein, 1106 aa, Homo sapiens
  Amino acid sequence of JTK12
MRLPGAMPALALKGELLLLSLLLLLEPQISQGLVVTPPGPELVLNVSSTFVLTCSGSAPVVWERMSQEPPQEMAKAQDGTFSSVLTLTNLTGLDTGEYFCTHNDSRGLETDERKRLYIFVPDPTVGFLPNDAEELFIFLTEITEITIPCRVTDPQLVVTLHEKKGDVALPVPYDHQRGFSGIFEDRSYICKTTIGDREVDSDAYYVYRLQVSSINVSVNAVQTVVRQGENITLMCIVIGNEVVNFEWTYPRKESGRLVEPVTDFLLDMPYHIRSILHIPSAELEDSGTYTCNVTESVNDHQDEKAINITVVESGYVRLLGEVGTLQFAELHRSRTLQVVFEAYPPPTVLWFKDNRTLGDSSAGEIALSTRNVSETRYVSELTLVRVKVAEAGHYTMRAFHEDAEVQLSFQLQINVPVRVLELSESHPDSGEQTVRCRGRGMPQPNIIWSACRDLKRCPRELPPTLLGNSSEEESQLETNVTYWEEEQEFEVVSTLRLQHVDRPLSVRCTLRNAVGQDTQEVIVVPHSLPFKVVVISAILALVVLTIISLIILIMLWQKKPRYEIRWKVIESVSSDGHEYIYVDPMQLPYDSTWELPRDQLVLGRTLGSGAFGQVVEATAHGLSHSQATMKVAVKMLKSTARSSEKQALMSELKIMSHLGPHLNVVNLLGACTKGGPIYIITEYCRYGDLVDYLHRNKHTFLQHHSDKRRPPSAELYSNALPVGLPLPSHVSLTGESDGGYMDMSKDESVDYVPMLDMKGDVKYADIESSNYMAPYDNYVPSAPERTCRATLINESPVLSYMDLVGFSYQVANGMEFLASKNCVHRDLAARNVLICEGKLVKICDFGLARDIMRDSNYISKGSTFLPLKWMAPESIFNSLYTTLSDVWSFGILLWEIFTLGGTPYPELPMNEQFYNAIKRGYRMAQPAHASDEIYEIMQKCWEEKFEIRPPFSQLVLLLERLLGEGYKKKYQQVDEEFLRSDHPAILRSQARLPGFHGLRSPLDTSSVLYTAVQPNEGDNDYIIPLPDPKPEVADEGPLEGSPSLASSTLNEVNTSSTISCDSPLEPQDEPEPEPQLELQVEPEPELEQLPDSGCPAPRAEAEDSFL

SEQ ID NO: 133 - DNA, 2202 bp, Homo sapiens
  Coding sequence for FGFR1
atgtggagctggaagtgcctcctcttctgggctgtgctggtcacagccacactctgcaccgctaggccgtccccgaccttgcctgaacaagatgctctcccctcctcggaggatgatgatgatgatgatgactcctcttcagaggagaaagaaacagataacaccaaaccaaaccgtatgcccgtagctccatattggacatccccagaaaagatggaaaagaaattgcatgcagtgccggctgccaagacagtgaagttcaaatgcccttccagtgggaccccaaaccccacactgcgctggttgaaaaatggcaaagaattcaaacctgaccacagaattggaggctacaaggtccgttatgccacctggagcatcataatggactctgtggtgccctctgacaagggcaactacacctgcattgtggagaatgagtacggcagcatcaaccacacataccagctggatgtcgtggagcggtcccctcaccggcccatcctgcaagcagggttgcccgccaacaaaacagtggccctgggtagcaacgtggagttcatgtgtaaggtgtacagtgacccgcagccgcacatccagtggctaaagcacatcgaggtgaatgggagcaagattggcccagacaacctgccttatgtccagatcttgaagactgctggagttaataccaccgacaaagagatggaggtgcttcacttaagaaatgtctcctttgaggacgcaggggagtatacgtgcttggcgggtaactctatcggactctcccatcactctgcatggttgaccgttctggaagccctggaagagaggccggcagtgatgacctcgcccctgtacctggagatcatcatctattgcacaggggccttcctcatctcctgcatggtggggtcggtcatcgtctacaagatgaagagtggtaccaagaagagtgacttccacagccagatggctgtgcacaagctggccaagagcatccctctgcgcagacaggtaacagtgtctgctgactccagtgcatccatgaactctggggttcttctggttcggccatcacggctctcctccagtgggactcccatgctagcaggggtctctgagtatgagcttcccgaagaccctcgctgggagctgcctcgggacagactggtcttaggcaaacccctgggagagggctgctttgggcaggtggtgttggcagaggctatcgggctggacaaggacaaacccaaccgtgtgaccaaagtggctgtgaagatgttgaagtcggacgcaacagagaaagacttgtcagacctgatctcagaaatggagatgatgaagatgatcgggaagcataagaatatcatcaacctgctgggggcctgcacgcaggatggtcccttgtatgtcatcgtggagtatgcctccaagggcaacctgcgggagtacctgcaggcccggaggcccccagggctggaatactgctacaaccccagccacaacccagaggagcagctctcctccaaggacctggtgtcctgcgcctaccaggtggcccgaggcatggagtatctggcctccaagaagtgcatacaccgagacctggcagccaggaatgtcctggtgacagaggacaatgtgatgaagatagcagactttggcctcgcacgggacattcaccacatcgactactataaaaagacaaccaacggccgactgcctgtgaagtggatggcacccgaggcattatttgaccggatctacacccaccagagtgatgtgtggtctttcggggtgctcctgtgggagatcttcactctgggcggctccccataccccggtgtgcctgtggaggaacttttcaagctgctgaaggagggtcaccgcatggacaagcccagtaactgcaccaacgagctgtacatgatgatgcgggactgctggcatgcagtgccctcacagagacccaccttcaagcagctggtggaagacctggaccgcatcgtggccttgacctccaaccaggagtacctggacctgtccatgcccctggaccagtactcccccagctttcccgacacccggagctctacgtgctcctcaggggaggattccgtcttctctcatgagccgctgcccgaggagccctgcctgccccgacacccagcccagcttgccaatggcggactcaaacgccgctga

SEQ ID NO: 134 - protein, 733 aa, Homo sapiens
  Amino acid sequence of FLT2
MWSWKCLLFWAVLVTATLCTARPSPTLPEQDALPSSEDDDDDDDSSSEEKETDNTKPNRMPVAPYWTSPEKMEKKLHAVPAAKTVKFKCPSSGTPNPTLRWLKNGKEFKPDHRIGGYKVRYATWSIIMDSVVPSDKGNYTCIVENEYGSINHTYQLDVVERSPHRPILQAGLPANKTVALGSNVEFMCKVYSDPQPHIQWLKHIEVNGSKIGPDNLPYVQILKTAGVNTTDKEMEVLHLRNVSFEDAGEYTCLAGNSIGLSHHSAWLTVLEALEERPAVMTSPLYLEIIIYCTGAFLISCMVGSVIVYKMKSGTKKSDFHSQMAVHKLAKSIPLRRQVTVSADSSASMNSGVLLVRPSRLSSSGTPMLAGVSEYELPEDPRWELPRDRLVLGKPLGEGCFGQVVLAEAIGLDKDKPNRVTKVAVKMLKSDATEKDLSDLISEMEMMKMIGKHKNIINLLGACTQDGPLYVIVEYASKGNLREYLQARRPPGLEYCYNPSHNPEEQLSSKDLVSCAYQVARGMEYLASKKCIHRDLAARNVLVTEDNVMKIADFGLARDIHHIDYYKKTTNGRLPVKWMAPEALFDRIYTHQSDVWSFGVLLWEIFTLGGSPYPGVPVEELFKLLKEGHRMDKPSNCTNELYMMMRDCWHAVPSQRPTFKQLVEDLDRIVALTSNQEYLDLSMPLDQYSPSFPDTRSSTCSSGEDSVFSHEPLPEEPCLPRHPAQLANGGLKRR

SEQ ID NO: 135 - DNA, 2124 bp, Homo sapiens
  Coding sequence for FGFR2
atggtcagctggggtcgtttcatctgcctggtcgtggtcaccatggcaaccttgtccctggcccggccctccttcagtttagttgaggataccacattagagccagaaggagcaccatactggaccaacacagaaaagatggaaaagcggctccatgctgtgcctgcggccaacactgtcaagtttcgctgcccagccggggggaacccaatgccaaccatgcggtggctgaaaaacgggaaggagtttaagcaggagcatcgcattggaggctacaaggtacgaaaccagcactggagcctcattatggaaagtgtggtcccatctgacaagggaaattatacctgtgtagtggagaatgaatacgggtccatcaatcacacgtaccacctggatgttgtggagcgatcgcctcaccggcccatcctccaagccggactgccggcaaatgcctccacagtggtcggaggagacgtagagtttgtctgcaaggtttacagtgatgcccagccccacatccagtggatcaagcacgtggaaaagaacggcagtaaatacgggcccgacgggctgccctacctcaaggttctcaagcactcggggataaatagttccaatgcagaagtgctggctctgttcaatgtgaccgaggcggatgctggggaatatatatgtaaggtctccaattatatagggcaggccaaccagtctgcctggctcactgtcctgccaaaacagcaagcgcctggaagagaaaaggagattacagcttccccagactacctggagatagccatttactgcataggggtcttcttaatcgcctgtatggtggtaacagtcatcctgtgccgaatgaagaacacgaccaagaagccagacttcagcagccagccggctgtgcacaagctgaccaaacgtatccccctgcggagacaggtaacagtttcggctgagtccagctcctccatgaactccaacaccccgctggtgaggataacaacacgcctctcttcaacggcagacacccccatgctggcaggggtctccgagtatgaacttccagaggacccaaaatgggagtttccaagagataagctgacactgggcaagcccctgggagaaggttgctttgggcaagtggtcatggcggaagcagtgggaattgacaaagacaagcccaaggaggcggtcaccgtggccgtgaagatgttgaaagatgatgccacagagaaagacctttctgatctggtgtcagagatggagatgatgaagatgattgggaaacacaagaatatcataaatcttcttggagcctgcacacaggatgggcctctctatgtcatagttgagtatgcctctaaaggcaacctccgagaatacctccgagcccggaggccacccgggatggagtactcctatgacattaaccgtgttcctgaggagcagatgaccttcaaggacttggtgtcatgcacctaccagctggccagacggatggagtacttggcttcccaaaaatgtattcatcgagatttagcagccagaaatgttttggtaacagaaaacaatgtgatgaaaatagcagactttggactcgccagagatatcaacaatatagactattacaaaaagaccaccaatgggcggcttccagtcaagtggatggctccagaagccctgtttgatagagtatacactcatcagagtgatgtctggtccttcggggtgttaatgtgggagatcttcactttagggggctcgccctacccagggattcccgtggaggaactttttaagctgctgaaggaaggacacagaatggataagccagccaactgcaccaacgaactgtacatgatgatgagggactgttggcatgcagtgccctcccagagaccaacgttcaagcagttggtagaagacttggatcgaattctcactctcacaaccaatgaggaatacttggacctcagccaacctctcgaacagtattcacctagttaccctgacacaagaagttcttgttcttcaggagatgattctgttttttctccagaccccatgccttacgaaccatgccttcctcagtatccacacataaacggcagtgttaaaacatga

SEQ ID NO: 136 - protein, 707 aa, Homo sapiens
  Amino acid sequence of KGFR
MVSWGRFICLVVVTMATLSLARPSFSLVEDTTLEPEGAPYWTNTEKMEKRLHAVPAANTVKFRCPAGGNPMPTMRWLKNGKEFKQEHRIGGYKVRNQHWSLIMESVVPSDKGNYTCVVENEYGSINHTYHLDVVERSPHRPILQAGLPANASTVVGGDVEFVCKVYSDAQPHIQWIKHVEKNGSKYGPDGLPYLKVLKHSGINSSNAEVLALFNVTEADAGEYICKVSNYIGQANQSAWLTVLPKQQAPGREKEITASPDYLEIAIYCIGVFLIACMVVTVILCRMKNTTKKPDFSSQPAVHKLTKRIPLRRQVTVSAESSSSMNSNTPLVRITTRLSSTADTPMLAGVSEYELPEDPKWEFPRDKLTLGKPLGEGCFGQVVMAEAVGIDKDKPKEAVTVAVKMLKDDATEKDLSDLVSEMEMMKMIGKHKNIINLLGACTQDGPLYVIVEYASKGNLREYLRARRPPGMEYSYDINRVPEEQMTFKDLVSCTYQLARRMEYLASQKCIHRDLAARNVLVTENNVMKIADFGLARDINNIDYYKKTTNGRLPVKWMAPEALFDRVYTHQSDVWSFGVLMWEIFTLGGSPYPGIPVEELFKLLKEGHRMDKPANCTNELYMMMRDCWHAVPSQRPTFKQLVEDLDRILTLTTNEEYLDLSQPLEQYSPSYPDTRSSCSSGDDSVFSPDPMPYEPCLPQYPHINGSVKT

SEQ ID NO: 137 - DNA, 2421 bp, Homo sapiens
  Coding sequence for FGFR3
atgggcgcccctgcctgcgccctcgcgctctgcgtggccgtggccatcgtggccggcgcctcctcggagtccttggggacggagcagcgcgtcgtggggcgagcggcagaagtcccgggcccagagcccggccagcaggagcagttggtcttcggcagcggggatgctgtggagctgagctgtcccccgcccgggggtggtcccatggggcccactgtctgggtcaaggatggcacagggctggtgccctcggagcgtgtcctggtggggccccagcggctgcaggtgctgaatgcctcccacgaggactccggggcctacagctgccggcagcggctcacgcagcgcgtactgtgccacttcagtgtgcgggtgacagacgctccatcctcgggagatgacgaagacggggaggacgaggctgaggacacaggtgtggacacaggggccccttactggacacggcccgagcggatggacaagaagctgctggccgtgccggccgccaacaccgtccgcttccgctgcccagccgctggcaaccccactccctccatctcctggctgaagaacggcagggagttccgcggcgagcaccgcattggaggcatcaagctgcggcatcagcagtggagcctggtcatggaaagcgtggtgccctcggaccgcggcaactacacctgcgtcgtggagaacaagtttggcagcatccggcagacgtacacgctggacgtgctggagcgctccccgcaccggcccatcctgcaggcggggctgccggccaaccagacggcggtgctgggcagcgacgtggagttccactgcaaggtgtacagtgacgcacagccccacatccagtggctcaagcacgtggaggtgaacggcagcaaggtgggcccggacggcacaccctacgttaccgtgctcaagacggcgggcgctaacaccaccgacaaggagctagaggttctctccttgcacaacgtcacctttgaggacgccggggagtacacctgcctggcgggcaattctattgggttttctcatcactctgcgtggctggtggtgctgccagccgaggaggagctggtggaggctgacgaggcgggcagtgtgtatgcaggcatcctcagctacggggtgggcttcttcctgttcatcctggtggtggcggctgtgacgctctgccgcctgcgcagcccccccaagaaaggcctgggctcccccaccgtgcacaagatctcccgcttcccgctcaagcgacaggtgtccctggagtccaacgcgtccatgagctccaacacaccactggtgcgcatcgcaaggctgtcctcaggggagggccccacgctggccaatgtctccgagctcgagctgcctgccgaccccaaatgggagctgtctcgggcccggctgaccctgggcaagccccttggggagggctgcttcggccaggtggtcatggcggaggccatcggcattgacaaggaccgggccgccaagcctgtcaccgtagccgtgaagatgctgaaagacgatgccactgacaaggacctgtcggacctggtgtctgagatggagatgatgaagatgatcgggaaacacaaaaacatcatcaacctgctgggcgcctgcacgcagggcgggcccctgtacgtgctggtggagtacgcggccaagggtaacctgcgggagtttctgcgggcgcggcggcccccgggcctggactactccttcgacacctgcaagccgcccgaggagcagctcaccttcaaggacctggtgtcctgtgcctaccaggtggcccggggcatggagtacttggcctcccagaagtgcatccacagggacctggctgcccgcaatgtgctggtgaccgaggacaacgtgatgaagatcgcagacttcgggctggcccgggacgtgcacaacctcgactactacaagaagacaaccaacggccggctgcccgtgaagtggatggcgcctgaggccttgtttgaccgagtctacactcaccagagtgacgtctggtcctttggggtcctgctctgggagatcttcacgctggggggctccccgtaccccggcatccctgtggaggagctcttcaagctgctgaaggagggccaccgcatggacaagcccgccaactgcacacacgacctgtacatgatcatgcgggagtgctggcatgccgcgccctcccagaggcccaccttcaagcagctggtggaggacctggaccgtgtccttaccgtgacgtccaccgacgagtacctggacctgtcggcgcctttcgagcagtactccccgggtggccaggacacccccagctccagctcctcaggggacgactccgtgtttgcccacgacctgctgcccccggccccacccagcagtgggggctcgcggacgtga

SEQ ID NO: 138 - protein, 806 aa, Homo sapiens
  Amino acid sequence of HBGFR
MGAPACALALCVAVAIVAGASSESLGTEQRVVGRAAEVPGPEPGQQEQLVFGSGDAVELSCPPPGGGPMGPTVWVKDGTGLVPSERVLVGPQRLQVLNASHEDSGAYSCRQRLTQRVLCHFSVRVTDAPSSGDDEDGEDEAEDTGVDTGAPYWTRPERMDKKLLAVPAANTVRFRCPAAGNPTPSISWLKNGREFRGEHRIGGIKLRHQQWSLVMESVVPSDRGNYTCVVENKFGSIRQTYTLDVLERSPHRPILQAGLPANQTAVLGSDVEFHCKVYSDAQPHIQWLKHVEVNGSKVGPDGTPYVTVLKTAGANTTDKELEVLSLHNVTFEDAGEYTCLAGNSIGFSHHSAWLVVLPAEEELVEADEAGSVYAGILSYGVGFFLFILVVAAVTLCRLRSPPKKGLGSPTVHKISRFPLKRQVSLESNASMSSNTPLVRIARLSSGEGPTLANVSELELPADPKWELSRARLTLGKPLGEGCFGQVVMAEAIGIDKDRAAKPVTVAVKMLKDDATDKDLSDLVSEMEMMKMIGKHKNIINLLGACTQGGPLYVLVEYAAKGNLREFLRARRPPGLDYSFDTCKPPEEQLTFKDLVSCAYQVARGMEYLASQKCIHRDLAARNVLVTEDNVMKIADFGLARDVHNLDYYKKTTNGRLPVKWMAPEALFDRVYTHQSDVWSFGVLLWEIFTLGGSPYPGIPVEELFKLLKEGHRMDKPANCTHDLYMIMRECWHAAPSQRPTFKQLVEDLDRVLTVTSTDEYLDLSAPFEQYSPGGQDTPSSSSSGDDSVFAHDLLPPAPPSSGGSRT

SEQ ID NO: 139 - DNA, 2409 bp, Homo sapiens
  Coding sequence for FGFR4
atgcggctgctgctggccctgttgggggtcctgctgagtgtgcctgggcctccagtcttgtccctggaggcctctgaggaagtggagcttgagccctgcctggctcccagcctggagcagcaagagcaggagctgacagtagcccttgggcagcctgtgcgtctgtgctgtgggcgggctgagcgtggtggccactggtacaaggagggcagtcgcctggcacctgctggccgtgtacggggctggaggggccgcctagagattgccagcttcctacctgaggatgctggccgctacctctgcctggcacgaggctccatgatcgtcctgcagaatctcaccttgattacaggtgactccttgacctccagcaacgatgatgaggaccccaagtcccatagggacccctcgaataggcacagttacccccagcaagcaccctactggacacacccccagcgcatggagaagaaactgcatgcagtacctgcggggaacaccgtcaagttccgctgtccagctgcaggcaaccccacgcccaccatccgctggcttaaggatggacaggcctttcatggggagaaccgcattggaggcattcggctgcgccatcagcactggagtctcgtgatggagagcgtggtgccctcggaccgcggcacatacacctgcctggtagagaacgctgtgggcagcatccgctataactacctgctagatgtgctggagcggtccccgcaccggcccatcctgcaggccgggctcccggccaacaccacagccgtggtgggcagcgacgtggagctgctgtgcaaggtgtacagcgatgcccagccccacatccagtggctgaagcacatcgtcatcaacggcagcagcttcggagccgacggtttcccctatgtgcaagtcctaaagactgcagacatcaatagctcagaggtggaggtcctgtacctgcggaacgtgtcagccgaggacgcaggcgagtacacctgcctcgcaggcaattccatcggcctctcctaccagtctgcctggctcacggtgctgccagaggaggaccccacatggaccgcagcagcgcccgaggccaggtatacggacatcatcctgtacgcgtcgggctccctggccttggctgtgctcctgctgctggccgggctgtatcgagggcaggcgctccacggccggcacccccgcccgcccgccactgtgcagaagctctcccgcttccctctggcccgacagttctccctggagtcaggctcttccggcaagtcaagctcatccctggtacgaggcgtgcgtctctcctccagcggccccgccttgctcgccggcctcgtgagtctagatctacctctcgacccactatgggagttcccccgggacaggctggtgcttgggaagcccctaggcgagggctgctttggccaggtagtacgtgcagaggcctttggcatggaccctgcccggcctgaccaagccagcactgtggccgtcaagatgctcaaagacaacgcctctgacaaggacctggccgacctggtctcggagatggaggtgatgaagctgatcggccgacacaagaacatcatcaacctgcttggtgtctgcacccaggaagggcccctgtacgtgatcgtggagtgcgccgccaagggaaacctgcgggagttcctgcgggcccggcgccccccaggccccgacctcagccccgacggtcctcggagcagtgaggggccgctctccttcccagtcctggtctcctgcgcctaccaggtggcccgaggcatgcagtatctggagtcccggaagtgtatccaccgggacctggctgcccgcaatgtgctggtgactgaggacaatgtgatgaagattgctgactttgggctggcccgcggcgtccaccacattgactactataagaaaaccagcaacggccgcctgcctgtgaagtggatggcgcccgaggccttgtttgaccgggtgtacacacaccagagtgacgtgtggtcttttgggatcctgctatgggagatcttcaccctcgggggctccccgtatcctggcatcccggtggaggagctgttctcgctgctgcgggagggacatcggatggaccgacccccacactgccccccagagctgtacgggctgatgcgtgagtgctggcacgcagcgccctcccagaggcctaccttcaagcagctggtggaggcgctggacaaggtcctgctggccgtctctgaggagtacctcgacctccgcctgaccttcggaccctattccccctctggtggggacgccagcagcacctgctcctccagcgattctgtcttcagccacgaccccctgccattgggatccagctccttccccttcgggtctggggtgcagacatga

SEQ ID NO: 140 - protein, 802 aa, Homo sapiens
  Amino acid sequence of FGFR4
MRLLLALLGVLLSVPGPPVLSLEASEEVELEPCLAPSLEQQEQELTVALGQPVRLCCGRAERGGHWYKEGSRLAPAGRVRGWRGRLEIASFLPEDAGRYLCLARGSMIVLQNLTLITGDSLTSSNDDEDPKSHRDPSNRHSYPQQAPYWTHPQRMEKKLHAVPAGNTVKFRCPAAGNPTPTIRWLKDGQAFHGENRIGGIRLRHQHWSLVMESVVPSDRGTYTCLVENAVGSIRYNYLLDVLERSPHRPILQAGLPANTTAVVGSDVELLCKVYSDAQPHIQWLKHIVINGSSFGADGFPYVQVLKTADINSSEVEVLYLRNVSAEDAGEYTCLAGNSIGLSYQSAWLTVLPEEDPTWTAAAPEARYTDIILYASGSLALAVLLLLAGLYRGQALHGRHPRPPATVQKLSRFPLARQFSLESGSSGKSSSSLVRGVRLSSSGPALLAGLVSLDLPLDPLWEFPRDRLVLGKPLGEGCFGQVVRAEAFGMDPARPDQASTVAVKMLKDNASDKDLADLVSEMEVMKLIGRHKNIINLLGVCTQEGPLYVIVECAAKGNLREFLRARRPPGPDLSPDGPRSSEGPLSFPVLVSCAYQVARGMQYLESRKCIHRDLAARNVLVTEDNVMKIADFGLARGVHHIDYYKKTSNGRLPVKWMAPEALFDRVYTHQSDVWSFGILLWEIFTLGGSPYPGIPVEELFSLLREGHRMDRPPHCPPELYGLMRECWHAAPSQRPTFKQLVEALDKVLLAVSEEYLDLRLTFGPYSPSGGDASSTCSSSDSVFSHDPLPLGSSSFPFGSGVQT

SEQ ID NO: 141 - DNA, 4017 bp, Homo sapiens
  Coding sequence for VEGFR1
atggtcagctactgggacaccggggtcctgctgtgcgcgctgctcagctgtctgcttctcacaggatctagttcaggttcaaaattaaaagatcctgaactgagtttaaaaggcacccagcacatcatgcaagcaggccagacactgcatctccaatgcaggggggaagcagcccataaatggtctttgcctgaaatggtgagtaaggaaagcgaaaggctgagcataactaaatctgcctgtggaagaaatggcaaacaattctgcagtactttaaccttgaacacagctcaagcaaaccacactggcttctacagctgcaaatatctagctgtacctacttcaaagaagaaggaaacagaatctgcaatctatatatttattagtgatacaggtagacctttcgtagagatgtacagtgaaatccccgaaattatacacatgactgaaggaagggagctcgtcattccctgccgggttacgtcacctaacatcactgttactttaaaaaagtttccacttgacactttgatccctgatggaaaacgcataatctgggacagtagaaagggcttcatcatatcaaatgcaacgtacaaagaaatagggcttctgacctgtgaagcaacagtcaatgggcatttgtataagacaaactatctcacacatcgacaaaccaatacaatcatagatgtccaaataagcacaccacgcccagtcaaattacttagaggccatactcttgtcctcaattgtactgctaccactcccttgaacacgagagttcaaatgacctggagttaccctgatgaaaaaaataagagagcttccgtaaggcgacgaattgaccaaagcaattcccatgccaacatattctacagtgttcttactattgacaaaatgcagaacaaagacaaaggactttatacttgtcgtgtaaggagtggaccatcattcaaatctgttaacacctcagtgcatatatatgataaagcattcatcactgtgaaacatcgaaaacagcaggtgcttgaaaccgtagctggcaagcggtcttaccggctctctatgaaagtgaaggcatttccctcgccggaagttgtatggttaaaagatgggttacctgcgactgagaaatctgctcgctatttgactcgtggctactcgttaattatcaaggacgtaactgaagaggatgcagggaattatacaatcttgctgagcataaaacagtcaaatgtgtttaaaaacctcactgccactctaattgtcaatgtgaaaccccagatttacgaaaaggccgtgtcatcgtttccagacccggctctctacccactgggcagcagacaaatcctgacttgtaccgcatatggtatccctcaacctacaatcaagtggttctggcacccctgtaaccataatcattccgaagcaaggtgtgacttttgttccaataatgaagagtcctttatcctggatgctgacagcaacatgggaaacagaattgagagcatcactcagcgcatggcaataatagaaggaaagaataagatggctagcaccttggttgtggctgactctagaatttctggaatctacatttgcatagcttccaataaagttgggactgtgggaagaaacataagcttttatatcacagatgtgccaaatgggtttcatgttaacttggaaaaaatgccgacggaaggagaggacctgaaactgtcttgcacagttaacaagttcttatacagagacgttacttggattttactgcggacagttaataacagaacaatgcactacagtattagcaagcaaaaaatggccatcactaaggagcactccatcactcttaatcttaccatcatgaatgtttccctgcaagattcaggcacctatgcctgcagagccaggaatgtatacacaggggaagaaatcctccagaagaaagaaattacaatcagagatcaggaagcaccatacctcctgcgaaacctcagtgatcacacagtggccatcagcagttccaccactttagactgtcatgctaatggtgtccccgagcctcagatcacttggtttaaaaacaaccacaaaatacaacaagagcctggaattattttaggaccaggaagcagcacgctgtttattgaaagagtcacagaagaggatgaaggtgtctatcactgcaaagccaccaaccagaagggctctgtggaaagttcagcatacctcactgttcaaggaacctcggacaagtctaatctggagctgatcactctaacatgcacctgtgtggctgcgactctcttctggctcctattaaccctccttatccgaaaaatgaaaaggtcttcttctgaaataaagactgactacctatcaattataatggacccagatgaagttcctttggatgagcagtgtgagcggctcccttatgatgccagcaagtgggagtttgcccgggagagacttaaactgggcaaatcacttggaagaggggcttttggaaaagtggttcaagcatcagcatttggcattaagaaatcacctacgtgccggactgtggctgtgaaaatgctgaaagagggggccacggccagcgagtacaaagctctgatgactgagctaaaaatcttgacccacattggccaccatctgaacgtggttaacctgctgggagcctgcaccaagcaaggagggcctctgatggtgattgttgaatactgcaaatatggaaatctctccaactacctcaagagcaaacgtgacttattttttctcaacaaggatgcagcactacacatggagcctaagaaagaaaaaatggagccaggcctggaacaaggcaagaaaccaagactagatagcgtcaccagcagcgaaagctttgcgagctccggctttcaggaagataaaagtctgagtgatgttgaggaagaggaggattctgacggtttctacaaggagcccatcactatggaagatctgatttcttacagttttcaagtggccagaggcatggagttcctgtcttccagaaagtgcattcatcgggacctggcagcgagaaacattcttttatctgagaacaacgtggtgaagatttgtgattttggccttgcccgggatatttataagaaccccgattatgtgagaaaaggagatactcgacttcctctgaaatggatggctcccgaatctatctttgacaaaatctacagcaccaagagcgacgtgtggtcttacggagtattgctgtgggaaatcttctccttaggtgggtctccatacccaggagtacaaatggatgaggacttttgcagtcgcctgagggaaggcatgaggatgagagctcctgagtactctactcctgaaatctatcagatcatgctggactgctggcacagagacccaaaagaaaggccaagatttgcagaacttgtggaaaaactaggtgatttgcttcaagcaaatgtacaacaggatggtaaagactacatcccaatcaatgccatactgacaggaaatagtgggtttacatactcaactcctgccttctctgaggacttcttcaaggaaagtatttcagctccgaagtttaattcaggaagctctgatgatgtcagatatgtaaatgctttcaagttcatgagcctggaaagaatcaaaacctttgaagaacttttaccgaatgccacctccatgtttgatgactaccagggcgacagcagcactctgttggcctctcccatgctgaagcgcttcacctggactgacagcaaacccaaggcctcgctcaagattgacttgagagtaaccagtaaaagtaaggagtcggggctgtctgatgtcagcaggcccagtttctgccattccagctgtgggcacgtcagcgaaggcaagcgcaggttcacctacgaccacgctgagctggaaaggaaaatcgcgtgctgctccccgcccccagactacaactcggtggtcctgtactccaccccacccatctag

SEQ ID NO: 142 - protein, 1338 aa, Homo sapiens
  Amino acid sequence of FLT1
MVSYWDTGVLLCALLSCLLLTGSSSGSKLKDPELSLKGTQHIMQAGQTLHLQCRGEAAHKWSLPEMVSKESERLSITKSACGRNGKQFCSTLTLNTAQANHTGFYSCKYLAVPTSKKKETESAIYIFISDTGRPFVEMYSEIPEIIHMTEGRELVIPCRVTSPNITVTLKKFPLDTLIPDGKRIIWDSRKGFIISNATYKEIGLLTCEATVNGHLYKTNYLTHRQTNTIIDVQISTPRPVKLLRGHTLVLNCTATTPLNTRVQMTWSYPDEKNKRASVRRRIDQSNSHANIFYSVLTIDKMQNKDKGLYTCRVRSGPSFKSVNTSVHIYDKAFITVKHRKQQVLETVAGKRSYRLSMKVKAFPSPEVVWLKDGLPATEKSARYLTRGYSLIIKDVTEEDAGNYTILLSIKQSNVFKNLTATLIVNVKPQIYEKAVSSFPDPALYPLGSRQILTCTAYGIPQPTIKWFWHPCNHNHSEARCDFCSNNEESFILDADSNMGNRIESITQRMAIIEGKNKMASTLVVADSRISGIYICIASNKVGTVGRNISFYITDVPNGFHVNLEKMPTEGEDLKLSCTVNKFLYRDVTWILLRTVNNRTMHYSISKQKMAITKEHSITLNLTIMNVSLQDSGTYACRARNVYTGEEILQKKEITIRDQEAPYLLRNLSDHTVAISSSTTLDCHANGVPEPQITWFKNNHKIQQEPGIILGPGSSTLFIERVTEEDEGVYHCKATNQKGSVESSAYLTVQGTSDKSNLELITLTCTCVAATLFWLLLTLLIRKMKRSSSEIKTDYLSIIMDPDEVPLDEQCERLPYDASKWEFARERLKLGKSLGRGAFGKVVQASAFGIKKSPTCRTVAVKMLKEGATASEYKALMTELKILTHIGHHLNVVNLLGACTKQGGPLMVIVEYCKYGNLSNYLKSKRDLFFLNKDAALHMEPKKEKMEPGLEQGKKPRLDSVTSSESFASSGFQEDKSLSDVEEEEDSDGFYKEPITMEDLISYSFQVARGMEFLSSRKCIHRDLAARNILLSENNVVKICDFGLARDIYKNPDYVRKGDTRLPLKWMAPESIFDKIYSTKSDVWSYGVLLWEIFSLGGSPYPGVQMDEDFCSRLREGMRMRAPEYSTPEIYQIMLDCWHRDPKERPRFAELVEKLGDLLQANVQQDGKDYIPINAILTGNSGFTYSTPAFSEDFFKESISAPKFNSGSSDDVRYVNAFKFMSLERIKTFEELLPNATSMFDDYQGDSSTLLASPMLKRFTWTDSKPKASLKIDLRVTSKSKESGLSDVSRPSFCHSSCGHVSEGKRRFTYDHAELERKIACCSPPPDYNSVVLYSTPPI

SEQ ID NO: 143 - DNA, 4071 bp, Homo sapiens
  Coding sequence for VEGFR2
atgcagagcaaggtgctgctggccgtcgccctgtggctctgcgtggagacccgggccgcctctgtgggtttgcctagtgtttctcttgatctgcccaggctcagcatacaaaaagacatacttacaattaaggctaatacaactcttcaaattacttgcaggggacagagggacttggactggctttggcccaataatcagagtggcagtgagcaaagggtggaggtgactgagtgcagcgatggcctcttctgtaagacactcacaattccaaaagtgatcggaaatgacactggagcctacaagtgcttctaccgggaaactgacttggcctcggtcatttatgtctatgttcaagattacagatctccatttattgcttctgttagtgaccaacatggagtcgtgtacattactgagaacaaaaacaaaactgtggtgattccatgtctcgggtccatttcaaatctcaacgtgtcactttgtgcaagatacccagaaaagagatttgttcctgatggtaacagaatttcctgggacagcaagaagggctttactattcccagctacatgatcagctatgctggcatggtcttctgtgaagcaaaaattaatgatgaaagttaccagtctattatgtacatagttgtcgttgtagggtataggatttatgatgtggttctgagtccgtctcatggaattgaactatctgttggagaaaagcttgtcttaaattgtacagcaagaactgaactaaatgtggggattgacttcaactgggaatacccttcttcgaagcatcagcataagaaacttgtaaaccgagacctaaaaacccagtctgggagtgagatgaagaaatttttgagcaccttaactatagatggtgtaacccggagtgaccaaggattgtacacctgtgcagcatccagtgggctgatgaccaagaagaacagcacatttgtcagggtccatgaaaaaccttttgttgcttttggaagtggcatggaatctctggtggaagccacggtgggggagcgtgtcagaatccctgcgaagtaccttggttacccacccccagaaataaaatggtataaaaatggaataccccttgagtccaatcacacaattaaagcggggcatgtactgacgattatggaagtgagtgaaagagacacaggaaattacactgtcatccttaccaatcccatttcaaaggagaagcagagccatgtggtctctctggttgtgtatgtcccaccccagattggtgagaaatctctaatctctcctgtggattcctaccagtacggcaccactcaaacgctgacatgtacggtctatgccattcctcccccgcatcacatccactggtattggcagttggaggaagagtgcgccaacgagcccagccaagctgtctcagtgacaaacccatacccttgtgaagaatggagaagtgtggaggacttccagggaggaaataaaattgaagttaataaaaatcaatttgctctaattgaaggaaaaaacaaaactgtaagtacccttgttatccaagcggcaaatgtgtcagctttgtacaaatgtgaagcggtcaacaaagtcgggagaggagagagggtgatctccttccacgtgaccaggggtcctgaaattactttgcaacctgacatgcagcccactgagcaggagagcgtgtctttgtggtgcactgcagacagatctacgtttgagaacctcacatggtacaagcttggcccacagcctctgccaatccatgtgggagagttgcccacacctgtttgcaagaacttggatactctttggaaattgaatgccaccatgttctctaatagcacaaatgacattttgatcatggagcttaagaatgcatccttgcaggaccaaggagactatgtctgccttgctcaagacaggaagaccaagaaaagacattgcgtggtcaggcagctcacagtcctagagcgtgtggcacccacgatcacaggaaacctggagaatcagacgacaagtattggggaaagcatcgaagtctcatgcacggcatctgggaatccccctccacagatcatgtggtttaaagataatgagacccttgtagaagactcaggcattgtattgaaggatgggaaccggaacctcactatccgcagagtgaggaaggaggacgaaggcctctacacctgccaggcatgcagtgttcttggctgtgcaaaagtggaggcatttttcataatagaaggtgcccaggaaaagacgaacttggaaatcattattctagtaggcacggcggtgattgccatgttcttctggctacttcttgtcatcatcctacggaccgttaagcgggccaatggaggggaactgaagacaggctacttgtccatcgtcatggatccagatgaactcccattggatgaacattgtgaacgactgccttatgatgccagcaaatgggaattccccagagaccggctgaagctaggtaagcctcttggccgtggtgcctttggccaagtgattgaagcagatgcctttggaattgacaagacagcaacttgcaggacagtagcagtcaaaatgttgaaagaaggagcaacacacagtgagcatcgagctctcatgtctgaactcaagatcctcattcatattggtcaccatctcaatgtggtcaaccttctaggtgcctgtaccaagccaggagggccactcatggtgattgtggaattctgcaaatttggaaacctgtccacttacctgaggagcaagagaaatgaatttgtcccctacaagaccaaaggggcacgattccgtcaagggaaagactacgttggagcaatccctgtggatctgaaacggcgcttggacagcatcaccagtagccagagctcagccagctctggatttgtggaggagaagtccctcagtgatgtagaagaagaggaagctcctgaagatctgtataaggacttcctgaccttggagcatctcatctgttacagcttccaagtggctaagggcatggagttcttggcatcgcgaaagtgtatccacagggacctggcggcacgaaatatcctcttatcggagaagaacgtggttaaaatctgtgactttggcttggcccgggatatttataaagatccagattatgtcagaaaaggagatgctcgcctccctttgaaatggatggccccagaaacaatttttgacagagtgtacacaatccagagtgacgtctggtcttttggtgttttgctgtgggaaatattttccttaggtgcttctccatatcctggggtaaagattgatgaagaattttgtaggcgattgaaagaaggaactagaatgagggcccctgattatactacaccagaaatgtaccagaccatgctggactgctggcacggggagcccagtcagagacccacgttttcagagttggtggaacatttgggaaatctcttgcaagctaatgctcagcaggatggcaaagactacattgttcttccgatatcagagactttgagcatggaagaggattctggactctctctgcctacctcacctgtttcctgtatggaggaggaggaagtatgtgaccccaaattccattatgacaacacagcaggaatcagtcagtatctgcagaacagtaagcgaaagagccggcctgtgagtgtaaaaacatttgaagatatcccgttagaagaaccagaagtaaaagtaatcccagatgacaaccagacggacagtggtatggttcttgcctcagaagagctgaaaactttggaagacagaaccaaattatctccatcttttggtggaatggtgcccagcaaaagcagggagtctgtggcatctgaaggctcaaaccagacaagcggctaccagtccggatatcactccgatgacacagacaccaccgtgtactccagtgaggaagcagaacttttaaagctgatagagattggagtgcaaaccggtagcacagcccagattctccagcctgactcggggaccacactgagctctcctcctgtttaa

SEQ ID NO: 144 - protein, 1356 aa, Homo sapiens
  Amino acid sequence of FLK1
MQSKVLLAVALWLCVETRAASVGLPSVSLDLPRLSIQKDILTIKANTTLQITCRGQRDLDWLWPNNQSGSEQRVEVTECSDGLFCKTLTIPKVIGNDTGAYKCFYRETDLASVIYVYVQDYRSPFIASVSDQHGVVYITENKNKTVVIPCLGSISNLNVSLCARYPEKRFVPDGNRISWDSKKGFTIPSYMISYAGMVFCEAKINDESYQSIMYIVVVVGYRIYDVVLSPSHGIELSVGEKLVLNCTARTELNVGIDFNWEYPSSKHQHKKLVNRDLKTQSGSEMKKFLSTLTIDGVTRSDQGLYTCAASSGLMTKKNSTFVRVHEKPFVAFGSGMESLVEATVGERVRIPAKYLGYPPPEIKWYKNGIPLESNHTIKAGHVLTIMEVSERDTGNYTVILTNPISKEKQSHVVSLVVYVPPQIGEKSLISPVDSYQYGTTQTLTCTVYAIPPPHHIHWYWQLEEECANEPSQAVSVTNPYPCEEWRSVEDFQGGNKIEVNKNQFALIEGKNKTVSTLVIQAANVSALYKCEAVNKVGRGERVISFHVTRGPEITLQPDMQPTEQESVSLWCTADRSTFENLTWYKLGPQPLPIHVGELPTPVCKNLDTLWKLNATMFSNSTNDILIMELKNASLQDQGDYVCLAQDRKTKKRHCVVRQLTVLERVAPTITGNLENQTTSIGESIEVSCTASGNPPPQIMWFKDNETLVEDSGIVLKDGNRNLTIRRVRKEDEGLYTCQACSVLGCAKVEAFFIIEGAQEKTNLEIIILVGTAVIAMFFWLLLVIILRTVKRANGGELKTGYLSIVMDPDELPLDEHCERLPYDASKWEFPRDRLKLGKPLGRGAFGQVIEADAFGIDKTATCRTVAVKMLKEGATHSEHRALMSELKILIHIGHHLNVVNLLGACTKPGGPLMVIVEFCKFGNLSTYLRSKRNEFVPYKTKGARFRQGKDYVGAIPVDLKRRLDSITSSQSSASSGFVEEKSLSDVEEEEAPEDLYKDFLTLEHLICYSFQVAKGMEFLASRKCIHRDLAARNILLSEKNVVKICDFGLARDIYKDPDYVRKGDARLPLKWMAPETIFDRVYTIQSDVWSFGVLLWEIFSLGASPYPGVKIDEEFCRRLKEGTRMRAPDYTTPEMYQTMLDCWHGEPSQRPTFSELVEHLGNLLQANAQQDGKDYIVLPISETLSMEEDSGLSLPTSPVSCMEEEEVCDPKFHYDNTAGISQYLQNSKRKSRPVSVKTFEDIPLEEPEVKVIPDDNQTDSGMVLASEELKTLEDRTKLSPSFGGMVPSKSRESVASEGSNQTSGYQSGYHSDDTDTTVYSSEEAELLKLIEIGVQTGSTAQILQPDSGTTLSSPPV

SEQ ID NO: 145 - DNA, 4092 bp, Homo sapiens
  Coding sequence for VEGFR3
atgcagcggggcgccgcgctgtgcctgcgactgtggctctgcctgggactcctggacggcctggtgagtgactactccatgacccccccgaccttgaacatcacggaggagtcacacgtcatcgacaccggtgacagcctgtccatctcctgcaggggacagcaccccctcgagtgggcttggccaggagctcaggaggcgccagccaccggagacaaggacagcgaggacacgggggtggtgcgagactgcgagggcacagacgccaggccctactgcaaggtgttgctgctgcacgaggtacatgccaacgacacaggcagctacgtctgctactacaagtacatcaaggcacgcatcgagggcaccacggccgccagctcctacgtgttcgtgagagactttgagcagccattcatcaacaagcctgacacgctcttggtcaacaggaaggacgccatgtgggtgccctgtctggtgtccatccccggcctcaatgtcacgctgcgctcgcaaagctcggtgctgtggccagacgggcaggaggtggtgtgggatgaccggcggggcatgctcgtgtccacgccactgctgcacgatgccctgtacctgcagtgcgagaccacctggggagaccaggacttcctttccaaccccttcctggtgcacatcacaggcaacgagctctatgacatccagctgttgcccaggaagtcgctggagctgctggtaggggagaagctggtcctcaactgcaccgtgtgggctgagtttaactcaggtgtcacctttgactgggactacccagggaagcaggcagagcggggtaagtgggtgcccgagcgacgctcccaacagacccacacagaactctccagcatcctgaccatccacaacgtcagccagcacgacctgggctcgtatgtgtgcaaggccaacaacggcatccagcgatttcgggagagcaccgaggtcattgtgcatgaaaatcccttcatcagcgtcgagtggctcaaaggacccatcctggaggccacggcaggagacgagctggtgaagctgcccgtgaagctggcagcgtaccccccgcccgagttccagtggtacaaggatggaaaggcactgtccgggcgccacagtccacatgccctggtgctcaaggaggtgacagaggccagcacaggcacctacaccctcgccctgtggaactccgctgctggcctgaggcgcaacatcagcctggagctggtggtgaatgtgcccccccagatacatgagaaggaggcctcctcccccagcatctactcgcgtcacagccgccaggccctcacctgcacggcctacggggtgcccctgcctctcagcatccagtggcactggcggccctggacaccctgcaagatgtttgcccagcgtagtctccggcggcggcagcagcaagacctcatgccacagtgccgtgactggagggcggtgaccacgcaggatgccgtgaaccccatcgagagcctggacacctggaccgagtttgtggagggaaagaataagactgtgagcaagctggtgatccagaatgccaacgtgtctgccatgtacaagtgtgtggtctccaacaaggtgggccaggatgagcggctcatctacttctatgtgaccaccatccccgacggcttcaccatcgaatccaagccatccgaggagctactagagggccagccggtgctcctgagctgccaagccgacagctacaagtacgagcatctgcgctggtaccgcctcaacctgtccacgctgcacgatgcgcacgggaacccgcttctgctcgactgcaagaacgtgcatctgttcgccacccctctggccgccagcctggaggaggtggcacctggggcgcgccacgccacgctcagcctgagtatcccccgcgtcgcgcccgagcacgagggccactatgtgtgcgaagtgcaagaccggcgcagccatgacaagcactgccacaagaagtacctgtcggtgcaggccctggaagcccctcggctcacgcagaacttgaccgacctcctggtgaacgtgagcgactcgctggagatgcagtgcttggtggccggagcgcacgcgcccagcatcgtgtggtacaaagacgagaggctgctggaggaaaagtctggagtcgacttggcggactccaaccagaagctgagcatccagcgcgtgcgcgaggaggatgcgggaccgtatctgtgcagcgtgtgcagacccaagggctgcgtcaactcctccgccagcgtggccgtggaaggctccgaggataagggcagcatggagatcgtgatccttgtcggtaccggcgtcatcgctgtcttcttctgggtcctcctcctcctcatcttctgtaacatgaggaggccggcccacgcagacatcaagacgggctacctgtccatcatcatggaccccggggaggtgcctctggaggagcaatgcgaatacctgtcctacgatgccagccagtgggaattcccccgagagcggctgcacctggggagagtgctcggctacggcgccttcgggaaggtggtggaagcctccgctttcggcatccacaagggcagcagctgtgacaccgtggccgtgaaaatgctgaaagagggcgccacggccagcgagcagcgcgcgctgatgtcggagctcaagatcctcattcacatcggcaaccacctcaacgtggtcaacctcctcggggcgtgcaccaagccgcagggccccctcatggtgatcgtggagttctgcaagtacggcaacctctccaacttcctgcgcgccaagcgggacgccttcagcccctgcgcggagaagtctcccgagcagcgcggacgcttccgcgccatggtggagctcgccaggctggatcggaggcggccggggagcagcgacagggtcctcttcgcgcggttctcgaagaccgagggcggagcgaggcgggcttctccagaccaagaagctgaggacctgtggctgagcccgctgaccatggaagatcttgtctgctacagcttccaggtggccagagggatggagttcctggcttcccgaaagtgcatccacagagacctggctgctcggaacattctgctgtcggaaagcgacgtggtgaagatctgtgactttggccttgcccgggacatctacaaagaccccgactacgtccgcaagggcagtgcccggctgcccctgaagtggatggcccctgaaagcatcttcgacaaggtgtacaccacgcagagtgacgtgtggtcctttggggtgcttctctgggagatcttctctctgggggcctccccgtaccctggggtgcagatcaatgaggagttctgccagcgcgtgagagacggcacaaggatgagggccccggagctggccactcccgccatacgccacatcatgctgaactgctggtccggagaccccaaggcgagacctgcattctcggagctggtggagatcctgggggacctgctccagggcaggggcctgcaagaggaagaggaggtctgcatggccccgcgcagctctcagagctcagaagagggcagcttctcgcaggtgtccaccatggccctacacatcgcccaggctgacgctgaggacagcccgccaagcctgcagcgccacagcctggccgccaggtattacaactgggtgtcctttcccgggtgcctggccagaggggctgagacccgtggttcctccaggatgaagacatttgaggaattccccatgaccccaacgacctacaaaggctctgtggacaaccagacagacagtgggatggtgctggcctcggaggagtttgagcagatagagagcaggcatagacaagaaagcggcttcagctgtaaaggacctggccagaatgtggctgtgaccagggcacaccctgactcccaagggaggcggcggcggcctgagcggggggcccgaggaggccaggtgttttacaacagcgagtatggggagctgtcggagccaagcgaggaggaccactgctccccgtctgcccgcgtgactttcttcacagacaacagctactaa

SEQ ID NO: 146 - protein, 1363 aa, Homo sapiens
  Amino acid sequence of FLT4
MQRGAALCLRLWLCLGLLDGLVSDYSMTPPTLNITEESHVIDTGDSLSISCRGQHPLEWAWPGAQEAPATGDKDSEDTGVVRDCEGTDARPYCKVLLLHEVHANDTGSYVCYYKYIKARIEGTTAASSYVFVRDFEQPFINKPDTLLVNRKDAMWVPCLVSIPGLNVTLRSQSSVLWPDGQEVVWDDRRGMLVSTPLLHDALYLQCETTWGDQDFLSNPFLVHITGNELYDIQLLPRKSLELLVGEKLVLNCTVWAEFNSGVTFDWDYPGKQAERGKWVPERRSQQTHTELSSILTIHNVSQHDLGSYVCKANNGIQRFRESTEVIVHENPFISVEWLKGPILEATAGDELVKLPVKLAAYPPPEFQWYKDGKALSGRHSPHALVLKEVTEASTGTYTLALWNSAAGLRRNISLELVVNVPPQIHEKEASSPSIYSRHSRQALTCTAYGVPLPLSIQWHWRPWTPCKMFAQRSLRRRQQQDLMPQCRDWRAVTTQDAVNPIESLDTWTEFVEGKNKTVSKLVIQNANVSAMYKCVVSNKVGQDERLIYFYVTTIPDGFTIESKPSEELLEGQPVLLSCQADSYKYEHLRWYRLNLSTLHDAHGNPLLLDCKNVHLFATPLAASLEEVAPGARHATLSLSIPRVAPEHEGHYVCEVQDRRSHDKHCHKKYLSVQALEAPRLTQNLTDLLVNVSDSLEMQCLVAGAHAPSIVWYKDERLLEEKSGVDLADSNQKLSIQRVREEDAGPYLCSVCRPKGCVNSSASVAVEGSEDKGSMEIVILVGTGVIAVFFWVLLLLIFCNMRRPAHADIKTGYLSIIMDPGEVPLEEQCEYLSYDASQWEFPRERLHLGRVLGYGAFGKVVEASAFGIHKGSSCDTVAVKMLKEGATASEQRALMSELKILIHIGNHLNVVNLLGACTKPQGPLMVIVEFCKYGNLSNFLRAKRDAFSPCAEKSPEQRGRFRAMVELARLDRRRPGSSDRVLFARFSKTEGGARRASPDQEAEDLWLSPLTMEDLVCYSFQVARGMEFLASRKCIHRDLAARNILLSESDVVKICDFGLARDIYKDPDYVRKGSARLPLKWMAPESIFDKVYTTQSDVWSFGVLLWEIFSLGASPYPGVQINEEFCQRVRDGTRMRAPELATPAIRHIMLNCWSGDPKARPAFSELVEILGDLLQGRGLQEEEEVCMAPRSSQSSEEGSFSQVSTMALHIAQADAEDSPPSLQRHSLAARYYNWVSFPGCLARGAETRGSSRMKTFEEFPMTPTTYKGSVDNQTDSGMVLASEEFEQIESRHRQESGFSCKGPGQNVAVTRAHPDSQGRRRRPERGARGGQVFYNSEYGELSEPSEEDHCSPSARVTFFTDNSY

SEQ ID NO: 147 - DNA, 2931 bp, Homo sapiens
  Coding sequence for EPHA1
atggagcggcgctggcccctggggctagggctggtgctgctgctctgcgccccgctgcccccgggggcgcgcgccaaggaagttactctgatggacacaagcaaggcacagggagagctgggctggctgctggatcccccaaaagatgggtggagtgaacagcaacagatactgaatgggacacccctgtacatgtaccaggactgcccaatgcaaggacgcagagacactgaccactggcttcgctccaattggatctaccgcggggaggaggcttcccgcgtccacgtggagctgcagttcaccgtgcgggactgcaagagtttccctgggggagccgggcctctgggctgcaaggagaccttcaaccttctgtacatggagagtgaccaggatgtgggcattcagctccgacggcccttgttccagaaggtaaccacggtggctgcagaccagagcttcaccattcgagaccttgcgtctggctccgtgaagctgaatgtggagcgctgctctctgggccgcctgacccgccgtggcctctacctcgctttccacaacccgggtgcctgtgtggccctggtgtctgtccgggtcttctaccagcgctgtcctgagaccctgaatggcttggcccaattcccagacactctgcctggccccgctgggttggtggaagtggcggggacctgcttgccccacgcgcgggccagccccaggccctcaggtgcaccccgcatgcactgcagccctgatggcgagtggctggtgcctgtaggacggtgccactgtgagcctggctatgaggaaggtggcagtggcgaagcatgtgttgcctgccctagcggctcctaccggatggacatggacacaccccattgtctcacgtgcccccagcagagcactgctgagtctgagggggccaccatctgtacctgtgagagcggccattacagagctcccggggagggcccccaggtggcatgcacaggtcccccctcggccccccgaaacctgagcttctctgcctcagggactcagctctccctgcgttgggaacccccagcagatacggggggacgccaggatgtcagatacagtgtgaggtgttcccagtgtcagggcacagcacaggacggggggccctgccagccctgtggggtgggcgtgcacttctcgccgggggcccgggggctcaccacacctgcagtgcatgtcaatggccttgaaccttatgccaactacacctttaatgtggaagcccaaaatggagtgtcagggctgggcagctctggccatgccagcacctcagtcagcatcagcatggggcatgcagagtcactgtcaggcctgtctctgagactggtgaagaaagaaccgaggcaactagagctgacctgggcggggtcccggccccgaagccctggggcgaacctgacctatgagctgcacgtgctgaaccaggatgaagaacggtaccagatggttctagaacccagggtcttgctgacagagctgcagcctgacaccacatacatcgtcagagtccgaatgctgaccccactgggtcctggccctttctcccctgatcatgagtttcggaccagcccaccagtgtccaggggcctgactggaggagagattgtagccgtcatctttgggctgctgcttggtgcagccttgctgcttgggattctcgttttccggtccaggagagcccagcggcagaggcagcagaggcagcgtgaccgcgccaccgatgtggatcgagaggacaagctgtggctgaagccttatgtggacctccaggcatacgaggaccctgcacagggagccctggactttacccgggagcttgatccagcgtggctgatggtggacactgtcataggagaaggagagtttggggaagtgtatcgagggaccctgaggctccccagccaggactgcaagactgtggccattaagaccttaaaagacacatccccaggtggccagtggtggaacttccttcgagaggcaactatcatgggccagtttagccacccgcatattctgcatctggaaggcgtcgtcacaaagcgaaagccgatcatgatcatcacagaatttatggagaatggagccctggatgccttcctgagggagcgggaggaccagctggtccctgggcagctagtggccatgctgcagggcatagcatctggcatgaactacctcagtaatcacaattatgtccaccgggacctggctgccagaaacatcttggtgaatcaaaacctgtgctgcaaggtgtctgactttggcctgactcgcctcctggatgactttgatggcacatacgaaacccagggaggaaagatccctatccgttggacagcccctgaagccattgcccatcggatcttcaccacagccagcgatgtgtggagctttgggattgtgatgtgggaggtgctgagctttggggacaagccttatggggagatgagcaatcaggaggttatgaagagcattgaggatgggtaccggttgccccctcctgtggactgccctgcccctctgtatgagctcatgaagaactgctgggcatatgaccgtgcccgccggccacacttccagaagcttcaggcacatctggagcaactgcttgccaacccccactccctgcggaccattgccaactttgaccccaggatgactcttcgcctgcccagcctgagtggctcagatgggatcccatatcgaaccgtctctgagtggctcgagtccatacgcatgaaacgctacatcctgcacttccactcggctgggctggacaccatggagtgtgtgctggagctgaccgctgaggacctgacgcagatgggaatcacactgcccgggcaccagaagcgcattctttgcagtattcagggattcaaggactga

SEQ ID NO: 148 - protein, 976 aa, Homo sapiens
  Amino acid sequence of EPH
MERRWPLGLGLVLLLCAPLPPGARAKEVTLMDTSKAQGELGWLLDPPKDGWSEQQQILNGTPLYMYQDCPMQGRRDTDHWLRSNWIYRGEEASRVHVELQFTVRDCKSFPGGAGPLGCKETFNLLYMESDQDVGIQLRRPLFQKVTTVAADQSFTIRDLASGSVKLNVERCSLGRLTRRGLYLAFHNPGACVALVSVRVFYQRCPETLNGLAQFPDTLPGPAGLVEVAGTCLPHARASPRPSGAPRMHCSPDGEWLVPVGRCHCEPGYEEGGSGEACVACPSGSYRMDMDTPHCLTCPQQSTAESEGATICTCESGHYRAPGEGPQVACTGPPSAPRNLSFSASGTQLSLRWEPPADTGGRQDVRYSVRCSQCQGTAQDGGPCQPCGVGVHFSPGARGLTTPAVHVNGLEPYANYTFNVEAQNGVSGLGSSGHASTSVSISMGHAESLSGLSLRLVKKEPRQLELTWAGSRPRSPGANLTYELHVLNQDEERYQMVLEPRVLLTELQPDTTYIVRVRMLTPLGPGPFSPDHEFRTSPPVSRGLTGGEIVAVIFGLLLGAALLLGILVFRSRRAQRQRQQRQRDRATDVDREDKLWLKPYVDLQAYEDPAQGALDFTRELDPAWLMVDTVIGEGEFGEVYRGTLRLPSQDCKTVAIKTLKDTSPGGQWWNFLREATIMGQFSHPHILHLEGVVTKRKPIMIITEFMENGALDAFLREREDQLVPGQLVAMLQGIASGMNYLSNHNYVHRDLAARNILVNQNLCCKVSDFGLTRLLDDFDGTYETQGGKIPIRWTAPEAIAHRIFTTASDVWSFGIVMWEVLSFGDKPYGEMSNQEVMKSIEDGYRLPPPVDCPAPLYELMKNCWAYDRARRPHFQKLQAHLEQLLANPHSLRTIANFDPRMTLRLPSLSGSDGIPYRTVSEWLESIRMKRYILHFHSAGLDTMECVLELTAEDLTQMGITLPGHQKRILCSIQGFKD

SEQ ID NO: 149 - DNA, 2931 bp, Homo sapiens
  Coding sequence for EPHA2
atggagctccaggcagcccgcgcctgcttcgccctgctgtggggctgtgcgctggccgcggccgcggcggcgcagggcaaggaagtggtactgctggactttgctgcagctggaggggagctcggctggctcacacacccgtatggcaaagggtgggacctgatgcagaacatcatgaatgacatgccgatctacatgtactccgtgtgcaacgtgatgtctggcgaccaggacaactggctccgcaccaactgggtgtaccgaggagaggctgagcgtatcttcattgagctcaagtttactgtacgtgactgcaacagcttccctggtggcgccagctcctgcaaggagactttcaacctctactatgccgagtcggacctggactacggcaccaacttccagaagcgcctgttcaccaagattgacaccattgcgcccgatgagatcaccgtcagcagcgacttcgaggcacgccacgtgaagctgaacgtggaggagcgctccgtggggccgctcacccgcaaaggcttctacctggccttccaggatatcggtgcctgtgtggcgctgctctccgtccgtgtctactacaagaagtgccccgagctgctgcagggcctggcccacttccctgagaccatcgccggctctgatgcaccttccctggccactgtggccggcacctgtgtggaccatgccgtggtgccaccggggggtgaagagccccgtatgcactgtgcagtggatggcgagtggctggtgcccattgggcagtgcctgtgccaggcaggctacgagaaggtggaggatgcctgccaggcctgctcgcctggattttttaagtttgaggcatctgagagcccctgcttggagtgccctgagcacacgctgccatcccctgagggtgccacctcctgcgagtgtgaggaaggcttcttccgggcacctcaggacccagcgtcgatgccttgcacacgacccccctccgccccacactacctcacagccgtgggcatgggtgccaaggtggagctgcgctggacgccccctcaggacagcgggggccgcgaggacattgtctacagcgtcacctgcgaacagtgctggcccgagtctggggaatgcgggccgtgtgaggccagtgtgcgctactcggagcctcctcacggactgacccgcaccagtgtgacagtgagcgacctggagccccacatgaactacaccttcaccgtggaggcccgcaatggcgtctcaggcctggtaaccagccgcagcttccgtactgccagtgtcagcatcaaccagacagagccccccaaggtgaggctggagggccgcagcaccacctcgcttagcgtctcctggagcatccccccgccgcagcagagccgagtgtggaagtacgaggtcacttaccgcaagaagggagactccaacagctacaatgtgcgccgcaccgagggtttctccgtgaccctggacgacctggccccagacaccacctacctggtccaggtgcaggcactgacgcaggagggccagggggccggcagcaaggtgcacgaattccagacgctgtccccggagggatctggcaacttggcggtgattggcggcgtggctgtcggtgtggtcctgcttctggtgctggcaggagttggcttctttatccaccgcaggaggaagaaccagcgtgcccgccagtccccggaggacgtttacttctccaagtcagaacaactgaagcccctgaagacatacgtggacccccacacatatgaggaccccaaccaggctgtgttgaagttcactaccgagatccatccatcctgtgtcactcggcagaaggtgatcggagcaggagagtttggggaggtgtacaagggcatgctgaagacatcctcggggaagaaggaggtgccggtggccatcaagacgctgaaagccggctacacagagaagcagcgagtggacttcctcggcgaggccggcatcatgggccagttcagccaccacaacatcatccgcctagagggcgtcatctccaaatacaagcccatgatgatcatcactgagtacatggagaatggggccctggacaagttccttcgggagaaggatggcgagttcagcgtgctgcagctggtgggcatgctgcggggcatcgcagctggcatgaagtacctggccaacatgaactatgtgcaccgtgacctggctgcccgcaacatcctcgtcaacagcaacctggtctgcaaggtgtctgactttggcctgtcccgcgtgctggaggacgaccccgaggccacctacaccaccagtggcggcaagatccccatccgctggaccgccccggaggccatttcctaccggaagttcacctctgccagcgacgtgtggagctttggcattgtcatgtgggaggtgatgacctatggcgagcggccctactgggagttgtccaaccacgaggtgatgaaagccatcaatgatggcttccggctccccacacccatggactgcccctccgccatctaccagctcatgatgcagtgctggcagcaggagcgtgcccgccgccccaagttcgctgacatcgtcagcatcctggacaagctcattcgtgcccctgactccctcaagaccctggctgactttgacccccgcgtgtctatccggctccccagcacgagcggctcggagggggtgcccttccgcacggtgtccgagtggctggagtccatcaagatgcagcagtatacggagcacttcatggcggccggctacactgccatcgagaaggtggtgcagatgaccaacgacgacatcaagaggattggggtgcggctgcccggccaccagaagcgcatcgcctacagcctgctgggactcaaggaccaggtgaacactgtggggatccccatctga

SEQ ID NO: 150 - protein, 976 aa, Homo sapiens
  Amino acid sequence of ECK
MELQAARACFALLWGCALAAAAAAQGKEVVLLDFAAAGGELGWLTHPYGKGWDLMQNIMNDMPIYMYSVCNVMSGDQDNWLRTNWVYRGEAERIFIELKFTVRDCNSFPGGASSCKETFNLYYAESDLDYGTNFQKRLFTKIDTIAPDEITVSSDFEARHVKLNVEERSVGPLTRKGFYLAFQDIGACVALLSVRVYYKKCPELLQGLAHFPETIAGSDAPSLATVAGTCVDHAVVPPGGEEPRMHCAVDGEWLVPIGQCLCQAGYEKVEDACQACSPGFFKFEASESPCLECPEHTLPSPEGATSCECEEGFFRAPQDPASMPCTRPPSAPHYLTAVGMGAKVELRWTPPQDSGGREDIVYSVTCEQCWPESGECGPCEASVRYSEPPHGLTRTSVTVSDLEPHMNYTFTVEARNGVSGLVTSRSFRTASVSINQTEPPKVRLEGRSTTSLSVSWSIPPPQQSRVWKYEVTYRKKGDSNSYNVRRTEGFSVTLDDLAPDTTYLVQVQALTQEGQGAGSKVHEFQTLSPEGSGNLAVIGGVAVGVVLLLVLAGVGFFIHRRRKNQRARQSPEDVYFSKSEQLKPLKTYVDPHTYEDPNQAVLKFTTEIHPSCVTRQKVIGAGEFGEVYKGMLKTSSGKKEVPVAIKTLKAGYTEKQRVDFLGEAGIMGQFSHHNIIRLEGVISKYKPMMIITEYMENGALDKFLREKDGEFSVLQLVGMLRGIAAGMKYLANMNYVHRDLAARNILVNSNLVCKVSDFGLSRVLEDDPEATYTTSGGKIPIRWTAPEAISYRKFTSASDVWSFGIVMWEVMTYGERPYWELSNHEVMKAINDGFRLPTPMDCPSAIYQLMMQCWQQERARRPKFADIVSILDKLIRAPDSLKTLADFDPRVSIRLPSTSGSEGVPFRTVSEWLESIKMQQYTEHFMAAGYTAIEKVVQMTNDDIKRIGVRLPGHQKRIAYSLLGLKDQVNTVGIPI

SEQ ID NO: 151 - DNA, 2952 bp, Homo sapiens
  Coding sequence for EPHA3
atggattgtcagctctccatcctcctccttctcagctgctctgttctcgacagcttcggggaactgattccgcagccttccaatgaagtcaatctactggattcaaaaacaattcaaggggagctgggctggatctcttatccatcacatgggtgggaagagatcagtggtgtggatgaacattacacacccatcaggacttaccaggtgtgcaatgtcatggaccacagtcaaaacaattggctgagaacaaactgggtccccaggaactcagctcagaagatttatgtggagctcaagttcactctacgagactgcaatagcattccattggttttaggaacttgcaaggagacattcaacctgtactacatggagtctgatgatgatcatggggtgaaatttcgagagcatcagtttacaaagattgacaccattgcagctgatgaaagtttcactcaaatggatcttggggaccgtattctgaagctcaacactgagattagagaagtaggtcctgtcaacaagaagggattttatttggcatttcaagatgttggtgcttgtgttgccttggtgtctgtgagagtatacttcaaaaagtgcccatttacagtgaagaatctggctatgtttccagacacggtacccatggactcccagtccctggtggaggttagagggtcttgtgtcaacaattctaaggaggaagatcctccaaggatgtactgcagtacagaaggcgaatggcttgtacccattggcaagtgttcctgcaatgctggctatgaagaaagaggttttatgtgccaagcttgtcgaccaggtttctacaaggcattggatggtaatatgaagtgtgctaagtgcccgcctcacagttctactcaggaagatggttcaatgaactgcaggtgtgagaataattacttccgggcagacaaagaccctccatccatggcttgtacccgacctccatcttcaccaagaaatgttatctctaatataaacgagacctcagttatcctggactggagttggcccctggacacaggaggccggaaagatgttaccttcaacatcatatgtaaaaaatgtgggtggaatataaaacagtgtgagccatgcagcccaaatgtccgcttcctccctcgacagtttggactcaccaacaccacggtgacagtgacagaccttctggcacatactaactacacctttgagattgatgccgttaatggggtgtcagagctgagctccccaccaagacagtttgctgcggtcagcatcacaactaatcaggctgctccatcacctgtcctgacgattaagaaagatcggacctccagaaatagcatctctttgtcctggcaagaacctgaacatcctaatgggatcatattggactacgaggtcaaatactatgaaaagcaggaacaagaaacaagttataccattctgagggcaagaggcacaaatgttaccatcagtagcctcaagcctgacactatatacgtattccaaatccgagcccgaacagccgctggatatgggacgaacagccgcaagtttgagtttgaaactagtccagactctttctccatctctggtgaaagtagccaagtggtcatgatcgccatttcagcggcagtagcaattattctcctcactgttgtcatctatgttttgattgggaggttctgtggctataagtcaaaacatggggcagatgaaaaaagacttcattttggcaatgggcatttaaaacttccaggtctcaggacttatgttgacccacatacatatgaagaccctacccaagctgttcatgagtttgccaaggaattggatgccaccaacatatccattgataaagttgttggagcaggtgaatttggagaggtgtgcagtggtcgcttaaaacttccttcaaaaaaagagatttcagtggccattaagaccctgaaagttggctacacagaaaagcagaggagagacttcctgggagaagcaagcattatgggacagtttgaccaccccaatatcattcgactggaaggagttgttaccaaaagtaagccagttatgattgtcacagaatacatggagaatggttccttggatagtttcctacgtaaacacgatgcccagtttactgtcattcagctagtggggatgcttcgagggatagcatctggcatgaagtacctgtcagacatgggctatgttcaccgagacctcgctgctcggaacatcttgatcaacagtaacttggtgtgtaaggtttctgatttcggactttcgcgtgtcctggaggatgacccagaagctgcttatacaacaagaggagggaagatcccaatcaggtggacatcaccagaagctatagcctaccgcaagttcacgtcagccagcgatgtatggagttatgggattgttctctgggaggtgatgtcttatggagagagaccatactgggagatgtccaatcaggatgtaattaaagctgtagatgagggctatcgactgccaccccccatggactgcccagctgccttgtatcagctgatgctggactgctggcagaaagacaggaacaacagacccaagtttgagcagattgttagtattctggacaagcttatccggaatcccggcagcctgaagatcatcaccagtgcagccgcaaggccatcaaaccttcttctggaccaaagcaatgtggatatcactaccttccgcacaacaggtgactggcttaatggtgtctggacagcacactgcaaggaaatcttcacgggtgtggagtacagttcttgtgacacaatagccaagatttccacagatgacatgaaaaaggttggtgtcaccgtggttgggccacagaagaagatcatcagtagcattaaagctctagaaacgcaatcaaagaatggcccagttcccgtgtaa

SEQ ID NO: 152 - protein, 983 aa, Homo sapiens
  Amino acid sequence of HEK
MDCQLSILLLLSCSVLDSFGELIPQPSNEVNLLDSKTIQGELGWISYPSHGWEEISGVDEHYTPIRTYQVCNVMDHSQNNWLRTNWVPRNSAQKIYVELKFTLRDCNSIPLVLGTCKETFNLYYMESDDDHGVKFREHQFTKIDTIAADESFTQMDLGDRILKLNTEIREVGPVNKKGFYLAFQDVGACVALVSVRVYFKKCPFTVKNLAMFPDTVPMDSQSLVEVRGSCVNNSKEEDPPRMYCSTEGEWLVPIGKCSCNAGYEERGFMCQACRPGFYKALDGNMKCAKCPPHSSTQEDGSMNCRCENNYFRADKDPPSMACTRPPSSPRNVISNINETSVILDWSWPLDTGGRKDVTFNIICKKCGWNIKQCEPCSPNVRFLPRQFGLTNTTVTVTDLLAHTNYTFEIDAVNGVSELSSPPRQFAAVSITTNQAAPSPVLTIKKDRTSRNSISLSWQEPEHPNGIILDYEVKYYEKQEQETSYTILRARGTNVTISSLKPDTIYVFQIRARTAAGYGTNSRKFEFETSPDSFSISGESSQVVMIAISAAVAIILLTVVIYVLIGRFCGYKSKHGADEKRLHFGNGHLKLPGLRTYVDPHTYEDPTQAVHEFAKELDATNISIDKVVGAGEFGEVCSGRLKLPSKKEISVAIKTLKVGYTEKQRRDFLGEASIMGQFDHPNIIRLEGVVTKSKPVMIVTEYMENGSLDSFLRKHDAQFTVIQLVGMLRGIASGMKYLSDMGYVHRDLAARNILINSNLVCKVSDFGLSRVLEDDPEAAYTTRGGKIPIRWTSPEAIAYRKFTSASDVWSYGIVLWEVMSYGERPYWEMSNQDVIKAVDEGYRLPPPMDCPAALYQLMLDCWQKDRNNRPKFEQIVSILDKLIRNPGSLKIITSAAARPSNLLLDQSNVDITTFRTTGDWLNGVWTAHCKEIFTGVEYSSCDTIAKISTDDMKKVGVTVVGPQKKIISSIKALETQSKNGPVPV

SEQ ID NO: 153 - DNA, 2961 bp, Homo sapiens
  Coding sequence for EPHA4
atggctgggattttctatttcgccctattttcgtgtctcttcgggatttgcgacgctgtcacaggttccagggtataccccgcgaatgaagttaccttattggattccagatctgttcagggagaacttgggtggatagcaagccctctggaaggagggtgggaggaagtgagtatcatggatgaaaaaaatacaccaatccgaacctaccaagtgtgcaatgtgatggaacccagccagaataactggctacgaactgattggatcacccgagaaggggctcagagggtgtatattgagattaaattcaccttgagggactgcaatagtcttccgggcgtcatggggacttgcaaggagacgtttaacctgtactactatgaatcagacaacgacaaagagcgtttcatcagagagaaccagtttgtcaaaattgacaccattgctgctgatgagagcttcacccaagtggacattggtgacagaatcatgaagctgaacaccgagatccgggatgtagggccattaagcaaaaaggggttttacctggcttttcaggatgtgggggcctgcatcgccctggtatcagtccgtgtgttctataaaaagtgtccactcacagtccgcaatctggcccagtttcctgacaccatcacaggggctgatacgtcttccctggtggaagttcgaggctcctgtgtcaacaactcagaagagaaagatgtgccaaaaatgtactgtggggcagatggtgaatggctggtacccattggcaactgcctatgcaacgctgggcatgaggagcggagcggagaatgccaagcttgcaaaattggatattacaaggctctctccacggatgccacctgtgccaagtgcccaccccacagctactctgtctgggaaggagccacctcgtgcacctgtgaccgaggctttttcagagctgacaacgatgctgcctctatgccctgcacccgtccaccatctgctcccctgaacttgatttcaaatgtcaacgagacatctgtgaacttggaatggagtagccctcagaatacaggtggccgccaggacatttcctataatgtggtatgcaagaaatgtggagctggtgaccccagcaagtgccgaccctgtggaagtggggtccactacaccccacagcagaatggcttgaagaccaccaaagtctccatcactgacctcctagctcataccaattacacctttgaaatctgggctgtgaatggagtgtccaaatataaccctaacccagaccaatcagtttctgtcactgtgaccaccaaccaagcagcaccatcatccattgctttggtccaggctaaagaagtcacaagatacagtgtggcactggcttggctggaaccagatcggcccaatggggtaatcctggaatatgaagtcaagtattatgagaaggatcagaatgagcgaagctatcgtatagttcggacagctgccaggaacacagatatcaaaggcctgaaccctctcacttcctatgttttccacgtgcgagccaggacagcagctggctatggagacttcagtgagcccttggaggttacaaccaacacagtgccttcccggatcattggagatggggctaactccacagtccttctggtctctgtctcgggcagtgtggtgctggtggtaattctcattgcagcttttgtcatcagccggagacggagtaaatacagtaaagccaaacaagaagcggatgaagagaaacatttgaatcaaggtgtaagaacatatgtggacccctttacgtacgaagatcccaaccaagcagtgcgagagtttgccaaagaaattgacgcatcctgcattaagattgaaaaagttataggagttggtgaatttggtgaggtatgcagtgggcgtctcaaagtgcctggcaagagagagatctgtgtggctatcaagactctgaaagctggttatacagacaaacagaggagagacttcctgagtgaggccagcatcatgggacagtttgaccatccgaacatcattcacttggaaggcgtggtcactaaatgtaaaccagtaatgatcataacagagtacatggagaatggctccttggatgcattcctcaggaaaaatgatggcagatttacagtcattcagctggtgggcatgcttcgtggcattgggtctgggatgaagtatttatctgatatgagctatgtgcatcgtgatctggccgcacggaacatcctggtgaacagcaacttggtctgcaaagtgtctgattttggcatgtcccgagtgcttgaggatgatccggaagcagcttacaccaccaggggtggcaagattcctatccggtggactgcgccagaagcaattgcctatcgtaaattcacatcagcaagtgatgtatggagctatggaatcgttatgtgggaagtgatgtcgtacggggagaggccctattgggatatgtccaatcaagatgtgattaaagccattgaggaaggctatcggttaccccctccaatggactgccccattgcgctccaccagctgatgctagactgctggcagaaggagaggagcgacaggcctaaatttgggcagattgtcaacatgttggacaaactcatccgcaaccccaacagcttgaagaggacagggacggagagctccagacctaacactgccttgttggatccaagctcccctgaattctctgctgtggtatcagtgggcgattggctccaggccattaaaatggaccggtataaggataacttcacagctgctggttataccacactagaggctgtggtgcacgtgaaccaggaggacctggcaagaattggtatcacagccatcacgcaccagaataagattttgagcagtgtccaggcaatgcgaacccaaatgcagcagatgcacggcagaatggttcccgtctga

SEQ ID NO: 154 - protein, 986 aa, Homo sapiens
  Amino acid sequence of SEK1
MAGIFYFALFSCLFGICDAVTGSRVYPANEVTLLDSRSVQGELGWIASPLEGGWEEVSIMDEKNTPIRTYQVCNVMEPSQNNWLRTDWITREGAQRVYIEIKFTLRDCNSLPGVMGTCKETFNLYYYESDNDKERFIRENQFVKIDTIAADESFTQVDIGDRIMKLNTEIRDVGPLSKKGFYLAFQDVGACIALVSVRVFYKKCPLTVRNLAQFPDTITGADTSSLVEVRGSCVNNSEEKDVPKMYCGADGEWLVPIGNCLCNAGHEERSGECQACKIGYYKALSTDATCAKCPPHSYSVWEGATSCTCDRGFFRADNDAASMPCTRPPSAPLNLISNVNETSVNLEWSSPQNTGGRQDISYNVVCKKCGAGDPSKCRPCGSGVHYTPQQNGLKTTKVSITDLLAHTNYTFEIWAVNGVSKYNPNPDQSVSVTVTTNQAAPSSIALVQAKEVTRYSVALAWLEPDRPNGVILEYEVKYYEKDQNERSYRIVRTAARNTDIKGLNPLTSYVFHVRARTAAGYGDFSEPLEVTTNTVPSRIIGDGANSTVLLVSVSGSVVLVVILIAAFVISRRRSKYSKAKQEADEEKHLNQGVRTYVDPFTYEDPNQAVREFAKEIDASCIKIEKVIGVGEFGEVCSGRLKVPGKREICVAIKTLKAGYTDKQRRDFLSEASIMGQFDHPNIIHLEGVVTKCKPVMIITEYMENGSLDAFLRKNDGRFTVIQLVGMLRGIGSGMKYLSDMSYVHRDLAARNILVNSNLVCKVSDFGMSRVLEDDPEAAYTTRGGKIPIRWTAPEAIAYRKFTSASDVWSYGIVMWEVMSYGERPYWDMSNQDVIKAIEEGYRLPPPMDCPIALHQLMLDCWQKERSDRPKFGQIVNMLDKLIRNPNSLKRTGTESSRPNTALLDPSSPEFSAVVSVGDWLQAIKMDRYKDNFTAAGYTTLEAVVHVNQEDLARIGITAITHQNKILSSVQAMRTQMQQMHGRMVPV

SEQ ID NO: 155 - DNA, 2976 bp, Homo sapiens
  Coding sequence for EPHA5
ccagcgtccctggccggctgctactctgcacctcgacgggctcccctctggacgtgccttctcctgtgcgccgcactccggaccctcctggccagccccagcaacgaagtgaatttattggattcacgcactgtcatgggggacctgggatggattgcttttccaaaaaatgggtgggaagagattggtgaagtggatgaaaattatgcccctatccacacataccaagtatgcaaagtgatggaacagaatcagaataactggcttttgaccagttggatctccaatgaaggtgcttccagaatcttcatagaactcaaatttaccctgcgggactgcaacagccttcctggaggactggggacctgtaaggaaacctttaatatgtattactttgagtcagatgatcagaatgggagaaacatcaaggaaaaccaatacatcaaaattgataccattgctgccgatgaaagctttacagaacttgatcttggtgaccgtgttatgaaactgaatacagaggtcagagatgtaggacctctaagcaaaaagggattttatcttgcttttcaagatgttggtgcttgcattgctctggtttctgtgcgtgtatactataaaaaatgcccttctgtggtacgacacttggctgtcttccctgacaccatcactggagctgattcttcccaattgctcgaagtgtcaggctcctgtgtcaaccattctgtgaccgatgaacctcccaaaatgcactgcagcgccgaaggggagtggctggtgcccatcgggaaatgcatgtgcaaggcaggatatgaagagaaaaatggcacctgtcaagtgtgcagacctgggttcttcaaagcctcacctcacatccagagctgcggcaaatgtccacctcacagttatacccatgaggaagcttcaacctcttgtgtctgtgaaaaggattatttcaggagagagtctgatccacccacaatggcatgcacaagacccccctctgctcctcggaatgccatctcaaatgttaatgaaactagtgtctttctggaatggattccgcctgctgacactggtggaaggaaagacgtgtcatattatattgcatgcaagaagtgcaactcccatgcaggtgtgtgtgaggagtgtggcggtcatgtcaggtaccttccccggcaaagcggcctgaaaaacacctctgtcatgatggtggatctactcgctcacacaaactatacctttgagattgaggcagtgaatggagtgtccgacttgagcccaggagcccggcagtatgtgtctgtaaatgtaaccacaaatcaagcagctccatctccagtcaccaatgtgaaaaaagggaaaattgcaaaaaacagcatctctttgtcttggcaagaaccagatcgtcccaatggaatcatcctagagtatgaaatcaagcattttgaaaaggaccaagagaccagctacacgattatcaaatctaaagagacaactattactgcagagggcttgaaaccagcttcagtttatgtcttccaaattcgagcacgtacagcagcaggctatggtgtcttcagtcgaagatttgagtttgaaaccaccccagtgtttgcagcatccagcgatcaaagccagattcctgtaattgctgtgtctgtgacagtaggagtcattttgttggcagtggttatcggcgtcctcctcagtggaaggcggtgtggctacagcaaagcaaaacaagatccagaagaggaaaagatgcattttcataatgggcacattaaactgccaggagtaagaacttacattgatccacatacctatgaggatcccaatcaagctgtccacgaatttgccaaggagatagaagcatcatgtatcaccattgagagagttattggagcaggtgaatttggtgaagtttgtagtggacgtttgaaactaccaggaaaaagagaattacctgtggctatcaaaacccttaaagtaggctatactgaaaagcaacgcagagatttcctaggtgaagcaagtatcatgggacagtttgatcatcctaacatcatccatttagaaggtgtggtgaccaaaagtaaaccagtgatgatcgtgacagagtatatggagaatggctctttagatacatttttgaagaaaaacgatgggcagttcactgtgattcagcttgttggcatgctgagaggtatctctgcaggaatgaagtacctttctgacatgggctatgtgcatagagatcttgctgccagaaacatcttaatcaacagtaaccttgtgtgcaaagtgtctgactttggactttcccgggtactggaagatgatcccgaggcagcctacaccacaaggggaggaaaaattccaatcagatggactgccccagaagcaatagctttccgaaagtttacttctgccagtgatgtctggagttatggaatagtaatgtgggaagttgtgtcttatggagagagaccctactgggagatgaccaatcaagatgtgattaaagcggtagaggaaggctatcgtctgccaagccccatggattgtcctgctgctctctatcagttaatgctggattgctggcagaaagagcgaaatagcaggcccaagtttgatgaaatagtcaacatgttggacaagctgatacgtaacccaagtagtctgaagacgctggttaatgcatcctgcagagtatctaatttattggcagaacatagcccactaggatctggggcctacagatcagtaggtgaatggctagaggcaatcaagatgggccggtatacagagattttcatggaaaatggatacagttcaatggacgctgtggctcaggtgaccttggaggatttgagacggcttggagtgactcttgtcggtcaccagaagaagatcatgaacagccttcaagaaatgaaggtgcagctggtaaacggaatggtgccattgtaa

SEQ ID NO: 156 - protein, 991 aa, Homo sapiens
  Amino acid sequence of EHK1
PASLAGCYSAPRRAPLWTCLLLCAALRTLLASPSNEVNLLDSRTVMGDLGWIAFPKNGWEEIGEVDENYAPIHTYQVCKVMEQNQNNWLLTSWISNEGASRIFIELKFTLRDCNSLPGGLGTCKETFNMYYFESDDQNGRNIKENQYIKIDTIAADESFTELDLGDRVMKLNTEVRDVGPLSKKGFYLAFQDVGACIALVSVRVYYKKCPSVVRHLAVFPDTITGADSSQLLEVSGSCVNHSVTDEPPKMHCSAEGEWLVPIGKCMCKAGYEEKNGTCQVCRPGFFKASPHIQSCGKCPPHSYTHEEASTSCVCEKDYFRRESDPPTMACTRPPSAPRNAISNVNETSVFLEWIPPADTGGRKDVSYYIACKKCNSHAGVCEECGGHVRYLPRQSGLKNTSVMMVDLLAHTNYTFEIEAVNGVSDLSPGARQYVSVNVTTNQAAPSPVTNVKKGKIAKNSISLSWQEPDRPNGIILEYEIKHFEKDQETSYTIIKSKETTITAEGLKPASVYVFQIRARTAAGYGVFSRRFEFETTPVFAASSDQSQIPVIAVSVTVGVILLAVVIGVLLSGRRCGYSKAKQDPEEEKMHFHNGHIKLPGVRTYIDPHTYEDPNQAVHEFAKEIEASCITIERVIGAGEFGEVCSGRLKLPGKRELPVAIKTLKVGYTEKQRRDFLGEASIMGQFDHPNIIHLEGVVTKSKPVMIVTEYMENGSLDTFLKKNDGQFTVIQLVGMLRGISAGMKYLSDMGYVHRDLAARNILINSNLVCKVSDFGLSRVLEDDPEAAYTTRGGKIPIRWTAPEAIAFRKFTSASDVWSYGIVMWEVVSYGERPYWEMTNQDVIKAVEEGYRLPSPMDCPAALYQLMLDCWQKERNSRPKFDEIVNMLDKLIRNPSSLKTLVNASCRVSNLLAEHSPLGSGAYRSVGEWLEAIKMGRYTEIFMENGYSSMDAVAQVTLEDLRRLGVTLVGHQKKIMNSLQEMKVQLVNGMVPL

SEQ ID NO: 157 - DNA, 1005 bp, Homo sapiens
  Coding sequence for EPHA6
atgaaagactctccatttcaagtgacaaaactgtactggcttaatgaaaagtgggactttattgcctcagcttctgacatggcagcagaacaaggacagattctcgtgatagccaccgccgctgttggcggattcactctcctcgtcatcctcactttattcttcttgatcactgggagatgtcagtggtacataaaagccaagatgaagtcagaagagaagagaagaaaccacttacagaatgggcatttgcgcttcccgggaattaaaacttacattgatccagatacatatgaagacccatccctagcagtccatgaatttgcaaaggagattgatccctcaagaattcgtattgagagagtcattggggcaggtgaatttggagaagtctgtagtgggcgtttgaagacaccagggaaaagagagatcccagttgccattaaaactttgaaaggtggccacatggatcggcaaagaagagattttctaagagaagctagtatcatgggccagtttgaccatccaaacatcattcgcctagaaggggttgtcaccaaaagatccttcccggccattggggtggaggcgttttgccccagcttcctgagggcagggtttttaaatagcatccaggccccgcatccagtgccagggggaggatctttgccccccaggattcctgctggcagaccagtaatgattgtggtggaatatatggagaatggatccctagactcctttttgcggaagcatgatggccacttcacagtcatccagttggtcggaatgctccgaggcattgcatcaggcatgaagtatctttctgatatgggttatgttcatcgagacctagcggctcggaatatactggtcaatagcaacttagtatgcaaagtttctgattttggtctctccagagtgctggaagatgatccagaagctgcttatacaacaactgacctcttccaaactctaacacttaacctctgctattctgcataa

SEQ ID NO: 158 - protein, 334 aa, Homo sapiens
  Amino acid sequence of EHK2
MKDSPFQVTKLYWLNEKWDFIASASDMAAEQGQILVIATAAVGGFTLLVILTLFFLITGRCQWYIKAKMKSEEKRRNHLQNGHLRFPGIKTYIDPDTYEDPSLAVHEFAKEIDPSRIRIERVIGAGEFGEVCSGRLKTPGKREIPVAIKTLKGGHMDRQRRDFLREASIMGQFDHPNIIRLEGVVTKRSFPAIGVEAFCPSFLRAGFLNSIQAPHPVPGGGSLPPRIPAGRPVMIVVEYMENGSLDSFLRKHDGHFTVIQLVGMLRGIASGMKYLSDMGYVHRDLAARNILVNSNLVCKVSDFGLSRVLEDDPEAAYTTTDLFQTLTLNLCYSA

SEQ ID NO: 159 - DNA, 2997 bp, Homo sapiens
  Coding sequence for EPHA7
atggtttttcaaactcggtacccttcatggattattttatgctacatctggctgctccgctttgcacacacaggggaggcgcaggctgcgaaggaagtactactgctggattctaaagcacaacaaacagagttggagtggatttcctctccacccaatgggtgggaagaaattagtggtttggatgagaactataccccgatacgaacataccaggtgtgccaagtcatggagcccaaccaaaacaactggctgcggactaactggatttccaaaggcaatgcacaaaggatttttgtagaattgaaattcaccctgagggattgtaacagtcttcctggagtactgggaacttgcaaggaaacatttaatttgtactattatgaaacagactatgacactggcaggaatataagagaaaacctctatgtaaaaatagacaccattgctgcagatgaaagttttacccaaggtgaccttggtgaaagaaagatgaagcttaacactgaggtgagagagattggacctttgtccaaaaagggattctatcttgcctttcaggatgtaggggcttgcatagctttggtttctgtcaaagtgtactacaagaagtgctggtccattattgagaacttagctatctttccagatacagtgactggttcagaattttcctctttagtcgaggttcgagggacatgtgtcagcagtgcagaggaagaagcggaaaacgcccccaggatgcactgcagtgcagaaggagaatggttagtgcccattggaaaatgtatctgcaaagcaggctaccagcaaaaaggagacacttgtgaaccctgtggccgtgggttctacaagtcttcctctcaagatcttcagtgctctcgttgtccaactcacagtttttctgataaagaaggctcctccagatgtgaatgtgaagatgggtattacagggctccatctgacccaccatacgttgcatgcacaaggcctccatctgcaccacagaacctcattttcaacatcaaccaaaccacagtaagtttggaatggagtcctcctgcagacaatgggggaagaaacgatgtgacctacagaatattgtgtaagcggtgcagttgggagcagggcgaatgtgttccctgtgggagtaacattggatacatgccccagcagactggattagaggataactatgtcactgtcatggacctgctagcccacgctaattatacttttgaagttgaagctgtaaatggagtttctgacttaagccgatcccagaggctctttgctgctgtcagtatcaccactggtcaagcagctccctcgcaagtgagcggagtaatgaaggagagagtactgcagcggagtgtcgagctttcctggcaggaaccagagcatcccaatggagtcatcacagaatatgaaatcaagtattacgagaaagatcaaagggaacggacctactcaacagtaaaaaccaagtctacttcagcctccattaataatctgaaaccaggaacagtgtatgttttccagattcgggcttttactgctgctggttatggaaattacagtcccagacttgatgttgctacactagaggaagctacaggtaaaatgtttgaagctacagctgtctccagtgaacagaatcctgttattatcattgctgtggttgctgtagctgggaccatcattttggtgttcatggtctttggcttcatcattgggagaaggcactgtggttatagcaaagctgaccaagaaggcgatgaagagctttactttcattttaaatttccaggcaccaaaacctacattgaccctgaaacctatgaggacccaaatagagctgtccatcaattcgccaaggagctagatgcctcctgtattaaaattgagcgtgtgattggtgcaggagaattcggtgaagtctgcagtggccgtttgaaacttccagggaaaagagatgttgcagtagccataaaaaccctgaaagttggttacacagaaaaacaaaggagagactttttgtgtgaagcaagcatcatggggcagtttgaccacccaaatgttgtccatttggaaggggttgttacaagagggaaaccagtcatgatagtaatagagttcatggaaaatggagccctagatgcatttctcaggaaacatgatgggcaatttacagtcattcagttagtaggaatgctgagaggaattgctgctggaatgagatatttggctgatatgggatatgttcacagggaccttgcagctcgcaatattcttgtcaacagcaatctcgtttgtaaagtgtcagattttggcctgtcccgagttatagaggatgatccagaagctgtctatacaactactggtggaaaaattccagtaaggtggacagcacccgaagccatccagtaccggaaattcacatcagccagtgatgtatggagctatggaatagtcatgtgggaagttatgtcttatggagaaagaccttattgggacatgtcaaatcaagatgttataaaagcaatagaagaaggttatcgtttaccagcacccatggactgcccagctggccttcaccagctaatgttggattgttggcaaaaggagcgtgctgaaaggccaaaatttgaacagatagttggaattctagacaaaatgattcgaaacccaaatagtctgaaaactcccctgggaacttgtagtaggccaataagccctcttctggatcaaaacactcctgatttcactaccttttgttcagttggagaatggctacaagctattaagatggaaagatataaagataatttcacggcagctggctacaattcccttgaatcagtagccaggatgactattgaggatgtgatgagtttagggatcacactggttggtcatcaaaagaaaatcatgagcagcattcagactatgagagcacaaatgctacatttacatggaactggcattcaagtgtga

SEQ ID NO: 160 - protein, 998 aa, Homo sapiens
  Amino acid sequence of MDK1
MVFQTRYPSWIILCYIWLLRFAHTGEAQAAKEVLLLDSKAQQTELEWISSPPNGWEEISGLDENYTPIRTYQVCQVMEPNQNNWLRTNWISKGNAQRIFVELKFTLRDCNSLPGVLGTCKETFNLYYYETDYDTGRNIRENLYVKIDTIAADESFTQGDLGERKMKLNTEVREIGPLSKKGFYLAFQDVGACIALVSVKVYYKKCWSIIENLAIFPDTVTGSEFSSLVEVRGTCVSSAEEEAENAPRMHCSAEGEWLVPIGKCICKAGYQQKGDTCEPCGRGFYKSSSQDLQCSRCPTHSFSDKEGSSRCECEDGYYRAPSDPPYVACTRPPSAPQNLIFNINQTTVSLEWSPPADNGGRNDVTYRILCKRCSWEQGECVPCGSNIGYMPQQTGLEDNYVTVMDLLAHANYTFEVEAVNGVSDLSRSQRLFAAVSITTGQAAPSQVSGVMKERVLQRSVELSWQEPEHPNGVITEYEIKYYEKDQRERTYSTVKTKSTSASINNLKPGTVYVFQIRAFTAAGYGNYSPRLDVATLEEATGKMFEATAVSSEQNPVIIIAVVAVAGTIILVFMVFGFIIGRRHCGYSKADQEGDEELYFHFKFPGTKTYIDPETYEDPNRAVHQFAKELDASCIKIERVIGAGEFGEVCSGRLKLPGKRDVAVAIKTLKVGYTEKQRRDFLCEASIMGQFDHPNVVHLEGVVTRGKPVMIVIEFMENGALDAFLRKHDGQFTVIQLVGMLRGIAAGMRYLADMGYVHRDLAARNILVNSNLVCKVSDFGLSRVIEDDPEAVYTTTGGKIPVRWTAPEAIQYRKFTSASDVWSYGIVMWEVMSYGERPYWDMSNQDVIKAIEEGYRLPAPMDCPAGLHQLMLDCWQKERAERPKFEQIVGILDKMIRNPNSLKTPLGTCSRPISPLLDQNTPDFTTFCSVGEWLQAIKMERYKDNFTAAGYNSLESVARMTIEDVMSLGITLVGHQKKIMSSIQTMRAQMLHLHGTGIQV

SEQ ID NO: 161 - DNA, 3018 bp, Homo sapiens
  Coding sequence for EPHA8
atggcccccgcccggggccgcctgccccctgcgctctgggtcgtcacggccgcggcggcggcggccacctgcgtgtccgcggcgcgcggcgaagtgaatttgctggacacgtcgaccatccacggggactggggctggctcacgtatccggctcatgggtgggactccatcaacgaggtggacgagtccttccagcccatccacacgtaccaggtttgcaacgtcatgagccccaaccagaacaactggctgcgcacgagctgggtcccccgagacggcgcccggcgcgtctatgctgagatcaagtttaccctgcgcgactgcaacagcatgcctggtgtgctgggcacctgcaaggagaccttcaacctctactacctggagtcggaccgcgacctgggggccagcacacaagaaagccagttcctcaaaatcgacaccattgcggccgacgagagcttcacaggtgccgaccttggtgtgcggcgtctcaagctcaacacggaggtgcgcagtgtgggtcccctcagcaagcgcggcttctacctggccttccaggacataggtgcctgcctggccatcctctctctccgcatctactataagaagtgccctgccatggtgcgcaatctggctgccttctcggaggcagtgacgggggccgactcgtcctcactggtggaggtgaggggccagtgcgtgcggcactcagaggagcgggacacacccaagatgtactgcagcgcggagggcgagtggctcgtgcccatcggcaaatgcgtgtgcagtgccggctacgaggagcggcgggatgcctgtgtggcctgtgagctgggcttctacaagtcagcccctggggaccagctgtgtgcccgctgccctccccacagccactccgcagctccagccgcccaagcctgccactgtgacctcagctactaccgtgcagccctggacccgccgtcctcagcctgcacccggccaccctcggcaccagtgaacctgatctccagtgtgaatgggacatcagtgactctggagtgggcccctcccctggacccaggtggccgcagtgacatcacctacaatgccgtgtgccgccgctgcccctgggcactgagccgctgcgaggcatgtgggagcggcacccgctttgtgccccagcagacaagcctggtgcaggccagcctgctggtggccaacctgctggcccacatgaactactccttctggatcgaggccgtcaatggcgtgtccgacctgagccccgagccccgccgggccgctgtggtcaacatcaccacgaaccaggcagccccgtcccaggtggtggtgatccgtcaagagcgggcggggcagaccagcgtctcgctgctgtggcaggagcccgagcagccgaacggcatcatcctggagtatgagatcaagtactacgagaaggacaaggagatgcagagctactccaccctcaaggccgtcaccaccagagccaccgtctccggcctcaagccgggcacccgctacgtgttccaggtccgagcccgcacctcagcaggctgtggccgcttcagccaggccatggaggtggagaccgggaaaccccggccccgctatgacaccaggaccattgtctggatctgcctgacgctcatcacgggcctggtggtgcttctgctcctgctcatctgcaagaagaggcactgtggctacagcaaggccttccaggactcggacgaggagaagatgcactatcagaatggacaggcacccccacctgtcttcctgcctctgcatcaccccccgggaaagctcccagagccccagttctatgcggaaccccacacctacgaggagccaggccgggcgggccgcagtttcactcgggagatcgaggcctctaggatccacatcgagaaaatcatcggctctggagactccggggaagtctgctacgggaggctgcgggtgccagggcagcgggatgtgcccgtggccatcaaggccctcaaagccggctacacggagagacagaggcgggacttcctgagcgaggcgtccatcatggggcaattcgaccatcccaacatcatccgcctcgagggtgtcgtcacccgtggccgcctggcaatgattgtgactgagtacatggagaacggctctctggacaccttcctgaggacccacgacgggcagttcaccatcatgcagctggtgggcatgctgagaggagtgggtgccggcatgcgctacctctcagacctgggctatgtccaccgagacctggccgcccgcaacgtcctggttgacagcaacctggtctgcaaggtgtctgacttcgggctctcacgggtgctggaggacgacccggatgctgcctacaccaccacgggcgggaagatccccatccgctggacggccccagaggccatcgccttccgcaccttctcctcggccagcgacgtgtggagcttcggcgtggtcatgtgggaggtgctggcctatggggagcggccctactggaacatgaccaaccgggatgtcatcagctctgtggaggaggggtaccgcctgcccgcacccatgggctgcccccacgccctgcaccagctcatgctcgactgttggcacaaggaccgggcgcagcggcctcgcttctcccagattgtcagtgtcctcgatgcgctcatccgcagccctgagagtctcagggccaccgccacagtcagcaggtgcccaccccctgccttcgtccggagctgctttgacctccgagggggcagcggtggcggtgggggcctcaccgtgggggactggctggactccatccgcatgggccggtaccgagaccacttcgctgcgggcggatactcctctctgggcatggtgctacgcatgaacgcccaggacgtgcgcgccctgggcatcaccctcatgggccaccagaagaagatcctgggcagcattcagaccatgcgggcccagctgaccagcacccaggggccccgccggcacctctga

SEQ ID NO: 162 - protein, 1005 aa, Homo sapiens
  Amino acid sequence of EEK
MAPARGRLPPALWVVTAAAAAATCVSAARGEVNLLDTSTIHGDWGWLTYPAHGWDSINEVDESFQPIHTYQVCNVMSPNQNNWLRTSWVPRDGARRVYAEIKFTLRDCNSMPGVLGTCKETFNLYYLESDRDLGASTQESQFLKIDTIAADESFTGADLGVRRLKLNTEVRSVGPLSKRGFYLAFQDIGACLAILSLRIYYKKCPAMVRNLAAFSEAVTGADSSSLVEVRGQCVRHSEERDTPKMYCSAEGEWLVPIGKCVCSAGYEERRDACVACELGFYKSAPGDQLCARCPPHSHSAAPAAQACHCDLSYYRAALDPPSSACTRPPSAPVNLISSVNGTSVTLEWAPPLDPGGRSDITYNAVCRRCPWALSRCEACGSGTRFVPQQTSLVQASLLVANLLAHMNYSFWIEAVNGVSDLSPEPRRAAVVNITTNQAAPSQVVVIRQERAGQTSVSLLWQEPEQPNGIILEYEIKYYEKDKEMQSYSTLKAVTTRATVSGLKPGTRYVFQVRARTSAGCGRFSQAMEVETGKPRPRYDTRTIVWICLTLITGLVVLLLLLICKKRHCGYSKAFQDSDEEKMHYQNGQAPPPVFLPLHHPPGKLPEPQFYAEPHTYEEPGRAGRSFTREIEASRIHIEKIIGSGDSGEVCYGRLRVPGQRDVPVAIKALKAGYTERQRRDFLSEASIMGQFDHPNIIRLEGVVTRGRLAMIVTEYMENGSLDTFLRTHDGQFTIMQLVGMLRGVGAGMRYLSDLGYVHRDLAARNVLVDSNLVCKVSDFGLSRVLEDDPDAAYTTTGGKIPIRWTAPEAIAFRTFSSASDVWSFGVVMWEVLAYGERPYWNMTNRDVISSVEEGYRLPAPMGCPHALHQLMLDCWHKDRAQRPRFSQIVSVLDALIRSPESLRATATVSRCPPPAFVRSCFDLRGGSGGGGGLTVGDWLDSIRMGRYRDHFAAGGYSSLGMVLRMNAQDVRALGITLMGHQKKILGSIQTMRAQLTSTQGPRRHL

SEQ ID NO: 163 - DNA, 2955 bp, Homo sapiens
  Coding sequence for EPHB1
atggccctggattatctactactgctcctcctggcatccgcagtggctgcgatggaagaaacgttaatggacaccagaacggctactgcagagctgggctggacggccaatcctgcgtccgggtgggaagaagtcagtggctacgatgaaaacctgaacaccatccgcacctaccaggtgtgcaatgtcttcgagcccaaccagaacaattggctgctcaccaccttcatcaaccggcggggggcccatcgcatctacacagagatgcgcttcactgtgagagactgcagcagcctccctaatgtcccaggatcctgcaaggagaccttcaacttgtattactatgagactgactctgtcattgccaccaagaagtcagccttctggtctgaggccccctacctcaaagtagacaccattgctgcagatgagagcttctcccaggtggactttgggggaaggctgatgaaggtaaacacagaagtcaggagctttgggcctcttactcggaatggtttttacctcgcttttcaggattatggagcctgtatgtctcttctttctgtccgtgtcttcttcaaaaagtgtcccagcattgtgcaaaattttgcagtgtttccagagactatgacaggggcagagagcacatctctggtgattgctcggggcacatgcatccccaacgcagaggaagtggacgtgcccatcaaactctactgcaacggggatggggaatggatggtgcctattgggcgatgcacctgcaagcctggctatgagcctgagaacagcgtggcatgcaaggcttgccctgcagggacattcaaggccagccaggaagctgaaggctgctcccactgcccctccaacagccgctcccctgcagaggcgtctcccatctgcacctgtcggaccggttattaccgagcggactttgaccctccagaagtggcatgcactagcgtcccatcaggtccccgcaatgttatctccatcgtcaatgagacgtccatcattctggagtggcaccctccaagggagacaggtgggcgggatgatgtgacctacaacatcatctgcaaaaagtgccgggcagaccgccggagctgctcccgctgtgacgacaatgtggagtttgtgcccaggcagctgggcctgacggagtgccgcgtctccatcagcagcctgtgggcccacaccccctacacctttgacatccaggccatcaatggagtctccagcaagagtcccttccccccacagcacgtctctgtcaacatcaccacaaaccaagccgccccctccaccgttcccatcatgcaccaagtcagtgccactatgaggagcatcaccttgtcatggccacagccggagcagcccaatggcatcatcctggactatgagatccggtactatgagaaggaacacaatgagttcaactcctccatggccaggagtcagaccaacacagcaaggattgatgggctgcggcctggcatggtatatgtggtacaggtgcgtgcccgcactgttgctggctacggcaagttcagtggcaagatgtgcttccagactctgactgacgatgattacaagtcagagctgagggagcagctgcccctgattgctggctcggcagcggccggggtcgtgttcgttgtgtccttggtggccatctctatcgtctgtagcaggaaacgggcttatagcaaagaggctgtgtacagcgataagctccagcattacagcacaggccgaggctccccagggatgaagatctacattgaccccttcacttacgaggatcccaacgaagctgtccgggagtttgccaaggagattgatgtatcttttgtgaaaattgaagaggtcatcggagcaggggagtttggagaagtgtacaaggggcgtttgaaactgccaggcaagagggaaatctacgtggccatcaagaccctgaaggcagggtactcggagaagcagcgtcgggactttctgagtgaggcgagcatcatgggccagttcgaccatcctaacatcattcgcctggagggtgtggtcaccaagagtcggcctgtcatgatcatcacagagttcatggagaatggtgcattggattctttcctcaggcaaaatgacgggcagttcaccgtgatccagcttgtgggtatgctcaggggcatcgctgctggcatgaagtacctggctgagatgaattatgtgcatcgggacctggctgctaggaacattctggtcaacagtaacctggtgtgcaaggtgtccgactttggcctctcccgctacctccaggatgacacctcagatcccacctacaccagctccttgggagggaagatccctgtgagatggacagctccagaggccatcgcctaccgcaagttcacttcagccagcgacgtttggagctatgggatcgtcatgtgggaagtcatgtcatttggagagagaccctattgggatatgtccaaccaagatgtcatcaatgccatcgagcaggactaccggctgcccccacccatggactgtccagctgctctacaccagctcatgctggactgttggcagaaggaccggaacagccggccccggtttgcggagattgtcaacaccctagataagatgatccggaacccggcaagtctcaagactgtggcaaccatcaccgccgtgccttcccagcccctgctcgaccgctccatcccagacttcacggcctttaccaccgtggatgactggctcagcgccatcaaaatggtccagtacagggacagcttcctcactgctggcttcacctccctccagctggtcacccagatgacatcagaagacctcctgagaataggcatcaccttggcaggccatcagaagaagatcctgaacagcattcattctatgagggtccagataagtcagtcaccaacggcaatggcatga

SEQ ID NO: 164 - protein, 984 aa, Homo sapiens
  Amino acid sequence of ELK
MALDYLLLLLLASAVAAMEETLMDTRTATAELGWTANPASGWEEVSGYDENLNTIRTYQVCNVFEPNQNNWLLTTFINRRGAHRIYTEMRFTVRDCSSLPNVPGSCKETFNLYYYETDSVIATKKSAFWSEAPYLKVDTIAADESFSQVDFGGRLMKVNTEVRSFGPLTRNGFYLAFQDYGACMSLLSVRVFFKKCPSIVQNFAVFPETMTGAESTSLVIARGTCIPNAEEVDVPIKLYCNGDGEWMVPIGRCTCKPGYEPENSVACKACPAGTFKASQEAEGCSHCPSNSRSPAEASPICTCRTGYYRADFDPPEVACTSVPSGPRNVISIVNETSIILEWHPPRETGGRDDVTYNIICKKCRADRRSCSRCDDNVEFVPRQLGLTECRVSISSLWAHTPYTFDIQAINGVSSKSPFPPQHVSVNITTNQAAPSTVPIMHQVSATMRSITLSWPQPEQPNGIILDYEIRYYEKEHNEFNSSMARSQTNTARIDGLRPGMVYVVQVRARTVAGYGKFSGKMCFQTLTDDDYKSELREQLPLIAGSAAAGVVFVVSLVAISIVCSRKRAYSKEAVYSDKLQHYSTGRGSPGMKIYIDPFTYEDPNEAVREFAKEIDVSFVKIEEVIGAGEFGEVYKGRLKLPGKREIYVAIKTLKAGYSEKQRRDFLSEASIMGQFDHPNIIRLEGVVTKSRPVMIITEFMENGALDSFLRQNDGQFTVIQLVGMLRGIAAGMKYLAEMNYVHRDLAARNILVNSNLVCKVSDFGLSRYLQDDTSDPTYTSSLGGKIPVRWTAPEAIAYRKFTSASDVWSYGIVMWEVMSFGERPYWDMSNQDVINAIEQDYRLPPPMDCPAALHQLMLDCWQKDRNSRPRFAEIVNTLDKMIRNPASLKTVATITAVPSQPLLDRSIPDFTAFTTVDDWLSAIKMVQYRDSFLTAGFTSLQLVTQMTSEDLLRIGITLAGHQKKILNSIHSMRVQISQSPTAMA

SEQ ID NO: 165 - DNA, 2964 bp, Homo sapiens
  Coding sequence for EPHB2
atggctctgcggaggctgggggccgcgctgctgctgctgccgctgctcgccgccgtggaagaaacgctaatggactccactacagcgactgctgagctgggctggatggtgcatcctccatcagggtgggaagaggtgagtggctacgatgagaacatgaacacgatccgcacgtaccaggtgtgcaacgtgtttgagtcaagccagaacaactggctacggaccaagtttatccggcgccgtggcgcccaccgcatccacgtggagatgaagttttcggtgcgtgactgcagcagcatccccagcgtgcctggctcctgcaaggagaccttcaacctctattactatgaggctgactttgactcggccaccaagaccttccccaactggatggagaatccatgggtgaaggtggataccattgcagccgacgagagcttctcccaggtggacctgggtggccgcgtcatgaaaatcaacaccgaggtgcggagcttcggacctgtgtcccgcagcggcttctacctggccttccaggactatggcggctgcatgtccctcatcgccgtgcgtgtcttctaccgcaagtgcccccgcatcatccagaatggcgccatcttccaggaaaccctgtcgggggctgagagcacatcgctggtggctgcccggggcagctgcatcgccaatgcggaagaggtggatgtacccatcaagctctactgtaacggggacggcgagtggctggtgcccatcgggcgctgcatgtgcaaagcaggcttcgaggccgttgagaatggcaccgtctgccgaggttgtccatctgggactttcaaggccaaccaaggggatgaggcctgtacccactgtcccatcaacagccggaccacttctgaaggggccaccaactgtgtctgccgcaatggctactacagagcagacctggaccccctggacatgccctgcacaaccatcccctccgcgccccaggctgtgatttccagtgtcaatgagacctccctcatgctggagtggacccctccccgcgactccggaggccgagaggacctcgtctacaacatcatctgcaagagctgtggctcgggccggggtgcctgcacccgctgcggggacaatgtacagtacgcaccacgccagctaggcctgaccgagccacgcatttacatcagtgacctgctggcccacacccagtacaccttcgagatccaggctgtgaacggcgttactgaccagagccccttctcgcctcagttcgcctctgtgaacatcaccaccaaccaggcagctccatcggcagtgtccatcatgcatcaggtgagccgcaccgtggacagcattaccctgtcgtggtcccagccggaccagcccaatggcgtgatcctggactatgagctgcagtactatgagaaggagctcagtgagtacaacgccacagccataaaaagccccaccaacacggtcaccgtgcagggcctcaaagccggcgccatctatgtcttccaggtgcgggcacgcaccgtggcaggctacgggcgctacagcggcaagatgtacttccagaccatgacagaagccgagtaccagacaagcatccaggagaagttgccactcatcatcggctcctcggccgctggcctggtcttcctcattgctgtggttgtcatcgccatcgtgtgtaacagaagacgggggtttgagcgtgctgactcggagtacacggacaagctgcaacactacaccagtggccacatgaccccaggcatgaagatctacatcgatcctttcacctacgaggaccccaacgaggcagtgcgggagtttgccaaggaaattgacatctcctgtgtcaaaattgagcaggtgatcggagcaggggagtttggcgaggtctgcagtggccacctgaagctgccaggcaagagagagatctttgtggccatcaagacgctcaagtcgggctacacggagaagcagcgccgggacttcctgagcgaagcctccatcatgggccagttcgaccatcccaacgtcatccacctggagggtgtcgtgaccaagagcacacctgtgatgatcatcaccgagttcatggagaatggctccctggactcctttctccggcaaaacgatgggcagttcacagtcatccagctggtgggcatgcttcggggcatcgcagctggcatgaagtacctggcagacatgaactatgttcaccgtgacctggctgcccgcaacatcctcgtcaacagcaacctggtctgcaaggtgtcggactttgggctctcacgctttctagaggacgatacctcagaccccacctacaccagtgccctgggcggaaagatccccatccgctggacagccccggaagccatccagtaccggaagttcacctcggccagtgatgtgtggagctacggcattgtcatgtgggaggtgatgtcctatggggagcggccctactgggacatgaccaaccaggatgtaatcaatgccattgagcaggactatcggctgccaccgcccatggactgcccgagcgccctgcaccaactcatgctggactgttggcagaaggaccgcaaccaccggcccaagttcggccaaattgtcaacacgctagacaagatgatccgcaatcccaacagcctcaaagccatggcgcccctctcctctggcatcaacctgccgctgctggaccgcacgatccccgactacaccagctttaacacggtggacgagtggctggaggccatcaagatggggcagtacaaggagagcttcgccaatgccggcttcacctcctttgacgtcgtgtctcagatgatgatggaggacattctccgggttggggtcactttggctggccaccagaaaaaaatcctgaacagtatccaggtgatgcgggcgcagatgaaccagattcagtctgtggaggtttga

SEQ ID NO: 166 - protein, 987 aa, Homo sapiens
  Amino acid sequence of NUK
MALRRLGAALLLLPLLAAVEETLMDSTTATAELGWMVHPPSGWEEVSGYDENMNTIRTYQVCNVFESSQNNWLRTKFIRRRGAHRIHVEMKFSVRDCSSIPSVPGSCKETFNLYYYEADFDSATKTFPNWMENPWVKVDTIAADESFSQVDLGGRVMKINTEVRSFGPVSRSGFYLAFQDYGGCMSLIAVRVFYRKCPRIIQNGAIFQETLSGAESTSLVAARGSCIANAEEVDVPIKLYCNGDGEWLVPIGRCMCKAGFEAVENGTVCRGCPSGTFKANQGDEACTHCPINSRTTSEGATNCVCRNGYYRADLDPLDMPCTTIPSAPQAVISSVNETSLMLEWTPPRDSGGREDLVYNIICKSCGSGRGACTRCGDNVQYAPRQLGLTEPRIYISDLLAHTQYTFEIQAVNGVTDQSPFSPQFASVNITTNQAAPSAVSIMHQVSRTVDSITLSWSQPDQPNGVILDYELQYYEKELSEYNATAIKSPTNTVTVQGLKAGAIYVFQVRARTVAGYGRYSGKMYFQTMTEAEYQTSIQEKLPLIIGSSAAGLVFLIAVVVIAIVCNRRRGFERADSEYTDKLQHYTSGHMTPGMKIYIDPFTYEDPNEAVREFAKEIDISCVKIEQVIGAGEFGEVCSGHLKLPGKREIFVAIKTLKSGYTEKQRRDFLSEASIMGQFDHPNVIHLEGVVTKSTPVMIITEFMENGSLDSFLRQNDGQFTVIQLVGMLRGIAAGMKYLADMNYVHRDLAARNILVNSNLVCKVSDFGLSRFLEDDTSDPTYTSALGGKIPIRWTAPEAIQYRKFTSASDVWSYGIVMWEVMSYGERPYWDMTNQDVINAIEQDYRLPPPMDCPSALHQLMLDCWQKDRNHRPKFGQIVNTLDKMIRNPNSLKAMAPLSSGINLPLLDRTIPDYTSFNTVDEWLEAIKMGQYKESFANAGFTSFDVVSQMMMEDILRVGVTLAGHQKKILNSIQVMRAQMNQIQSVEV

SEQ ID NO: 167 - DNA, 2997 bp, Homo sapiens
  Coding sequence for EPHB3
atggccagagcccgcccgccgccgccgccgtcgccgccgccggggcttctgccgctgctccctccgctgctgctgctgccgctgctgctgctgcccgccggctgccgggcgctggaagagaccctcatggacacaaaatgggtaacatctgagttggcgtggacatctcatccagaaagtgggtgggaagaggtgagtggctacgatgaggccatgaatcccatccgcacataccaggtgtgtaatgtgcgcgagtcaagccagaacaactggcttcgcacggggttcatctggcggcgggatgtgcagcgggtctacgtggagctcaagttcactgtgcgtgactgcaacagcatccccaacatccccggctcctgcaaggagaccttcaacctcttctactacgaggctgacagcgatgtggcctcagcctcctcccccttctggatggagaacccctacgtgaaagtggacaccattgcacccgatgagagcttctcgcggctggatgccggccgtgtcaacaccaaggtgcgcagctttgggccactttccaaggctggcttctacctggccttccaggaccagggcgcctgcatgtcgctcatctccgtgcgcgccttctacaagaagtgtgcatccaccaccgcaggcttcgcactcttccccgagaccctcactggggcggagcccacctcgctggtcattgctcctggcacctgcatccctaacgccgtggaggtgtcggtgccactcaagctctactgcaacggcgatggggagtggatggtgcctgtgggtgcctgcacctgtgccaccggccatgagccagctgccaaggagtcccagtgccgcccctgtccccctgggagctacaaggcgaagcagggagaggggccctgcctcccatgtccccccaacagccgtaccacctccccagccgccagcatctgcacctgccacaataacttctaccgtgcagactcggactctgcggacagtgcctgtaccaccgtgccatctccaccccgaggtgtgatctccaatgtgaatgaaacctcactgatcctcgagtggagtgagccccgggacctgggtggccgggatgacctcctgtacaatgtcatctgcaagaagtgccatggggctggaggggcctcagcctgctcacgctgtgatgacaacgtggagtttgtgcctcggcagctgggcctgacggagcgccgggtccacatcagccatctgctggcccacacgcgctacacctttgaggtgcaggcggtcaacggtgtctcgggcaagagccctctgccgcctcgttatgcggccgtgaatatcaccacaaaccaggctgccccgtctgaagtgcccacactacgcctgcacagcagctcaggcagcagcctcaccctatcctgggcacccccagagcggcccaacggagtcatcctggactacgagatgaagtactttgagaagagcgagggcatcgcctccacagtgaccagccagatgaactccgtgcagctggacgggcttcggcctgacgcccgctatgtggtccaggtccgtgcccgcacagtagctggctatgggcagtacagccgccctgccgagtttgagaccacaagtgagagaggctctggggcccagcagctccaggagcagcttcccctcatcgtgggctccgctacagctgggcttgtcttcgtggtggctgtcgtggtcatcgctatcgtctgcctcaggaagcagcgacacggctctgattcggagtacacggagaagctgcagcagtacattgctcctggaatgaaggtttatattgacccttttacctacgaggaccctaatgaggctgttcgggagtttgccaaggagatcgacgtgtcctgcgtcaagatcgaggaggtgatcggagctggggaatttggggaagtgtgccgtggtcgactgaaacagcctggccgccgagaggtgtttgtggccatcaagacgctgaaggtgggctacaccgagaggcagcggcgggacttcctaagcgaggcctccatcatgggtcagtttgatcaccccaatataatccggctcgagggcgtggtcaccaaaagtcggccagttatgatcctcactgagttcatggaaaactgcgccctggactccttcctccggctcaacgatgggcagttcacggtcatccagctggtgggcatgttgcggggcattgctgccggcatgaagtacctgtccgagatgaactatgtgcaccgcgacctggctgctcgcaacatccttgtcaacagcaacctggtctgcaaagtctcagactttggcctctcccgcttcctggaggatgacccctccgatcctacctacaccagttccctgggcgggaagatccccatccgctggactgccccagaggccatagcctatcggaagttcacttctgctagtgatgtctggagctacggaattgtcatgtgggaggtcatgagctatggagagcgaccctactgggacatgagcaaccaggatgtcatcaatgccgtggagcaggattaccggctgccaccacccatggactgtcccacagcactgcaccagctcatgctggactgctgggtgcgggaccggaacctcaggcccaaattctcccagattgtcaataccctggacaagctcatccgcaatgctgccagcctcaaggtcattgccagcgctcagtctggcatgtcacagcccctcctggaccgcacggtcccagattacacaaccttcacgacagttggtgattggctggatgccatcaagatggggcggtacaaggagagcttcgtcagtgcggggtttgcatcttttgacctggtggcccagatgacggcagaagacctgctccgtattggggtcaccctggccggccaccagaagaagatcctgagcagtatccaggacatgcggctgcagatgaaccagacgctgcctgtgcaggtctga

SEQ ID NO: 168 - protein, 998 aa, Homo sapiens
  Amino acid sequence of HEK2
MARARPPPPPSPPPGLLPLLPPLLLLPLLLLPAGCRALEETLMDTKWVTSELAWTSHPESGWEEVSGYDEAMNPIRTYQVCNVRESSQNNWLRTGFIWRRDVQRVYVELKFTVRDCNSIPNIPGSCKETFNLFYYEADSDVASASSPFWMENPYVKVDTIAPDESFSRLDAGRVNTKVRSFGPLSKAGFYLAFQDQGACMSLISVRAFYKKCASTTAGFALFPETLTGAEPTSLVIAPGTCIPNAVEVSVPLKLYCNGDGEWMVPVGACTCATGHEPAAKESQCRPCPPGSYKAKQGEGPCLPCPPNSRTTSPAASICTCHNNFYRADSDSADSACTTVPSPPRGVISNVNETSLILEWSEPRDLGGRDDLLYNVICKKCHGAGGASACSRCDDNVEFVPRQLGLTERRVHISHLLAHTRYTFEVQAVNGVSGKSPLPPRYAAVNITTNQAAPSEVPTLRLHSSSGSSLTLSWAPPERPNGVILDYEMKYFEKSEGIASTVTSQMNSVQLDGLRPDARYVVQVRARTVAGYGQYSRPAEFETTSERGSGAQQLQEQLPLIVGSATAGLVFVVAVVVIAIVCLRKQRHGSDSEYTEKLQQYIAPGMKVYIDPFTYEDPNEAVREFAKEIDVSCVKIEEVIGAGEFGEVCRGRLKQPGRREVFVAIKTLKVGYTERQRRDFLSEASIMGQFDHPNIIRLEGVVTKSRPVMILTEFMENCALDSFLRLNDGQFTVIQLVGMLRGIAAGMKYLSEMNYVHRDLAARNILVNSNLVCKVSDFGLSRFLEDDPSDPTYTSSLGGKIPIRWTAPEAIAYRKFTSASDVWSYGIVMWEVMSYGERPYWDMSNQDVINAVEQDYRLPPPMDCPTALHQLMLDCWVRDRNLRPKFSQIVNTLDKLIRNAASLKVIASAQSGMSQPLLDRTVPDYTTFTTVGDWLDAIKMGRYKESFVSAGFASFDLVAQMTAEDLLRIGVTLAGHQKKILSSIQDMRLQMNQTLPVQV

SEQ ID NO: 169 - DNA, 2964 bp, Homo sapiens
  Coding sequence for EPHB4
atggagctccgggtgctgctctgctgggcttcgttggccgcagctttggaagagaccctgctgaacacaaaattggaaactgctgatctgaagtgggtgacattccctcaggtggacgggcagtgggaggaactgagcggcctggatgaggaacagcacagcgtgcgcacctacgaagtgtgtgacgtgcagcgtgccccgggccaggcccactggcttcgcacaggttgggtcccacggcggggcgccgtccacgtgtacgccacgctgcgcttcaccatgctcgagtgcctgtccctgcctcgggctgggcgctcctgcaaggagaccttcaccgtcttctactatgagagcgatgcggacacggccacggccctcacgccagcctggatggagaacccctacatcaaggtggacacggtggccgcggagcatctcacccggaagcgccctggggccgaggccaccgggaaggtgaatgtcaagacgctgcgtctgggaccgctcagcaaggctggcttctacctggccttccaggaccagggtgcctgcatggccctgctatccctgcacctcttctacaaaaagtgcgcccagctgactgtgaacctgactcgattcccggagactgtgcctcgggagctggttgtgcccgtggccggtagctgcgtggtggatgccgtccccgcccctggccccagccccagcctctactgccgtgaggatggccagtgggccgaacagccggtcacgggctgcagctgtgctccggggttcgaggcagctgaggggaacaccaagtgccgagcctgtgcccagggcaccttcaagcccctgtcaggagaagggtcctgccagccatgcccagccaatagccactctaacaccattggatcagccgtctgccagtgccgcgtcgggtacttccgggcacgcacagacccccggggtgcaccctgcaccacccctccttcggctccgcggagcgtggtttcccgcctgaacggctcctccctgcacctggaatggagtgcccccctggagtctggtggccgagaggacctcacctacgccctccgctgccgggagtgccgacccggaggctcctgtgcgccctgcgggggagacctgacttttgaccccggcccccgggacctggtggagccctgggtggtggttcgagggctacgtcctgacttcacctatacctttgaggtcactgcattgaacggggtatcctccttagccacggggcccgtcccatttgagcctgtcaatgtcaccactgaccgagaggtacctcctgcagtgtctgacatccgggtgacgcggtcctcacccagcagcttgagcctggcctgggctgttccccgggcacccagtggggctgtgctggactacgaggtcaaataccatgagaagggcgccgagggtcccagcagcgtgcggttcctgaagacgtcagaaaaccgggcagagctgcgggggctgaagcggggagccagctacctggtgcaggtacgggcgcgctctgaggccggctacgggcccttcggccaggaacatcacagccagacccaactggatgagagcgagggctggcgggagcagctggccctgattgcgggcacggcagtcgtgggtgtggtcctggtcctggtggtcattgtggtcgcagttctctgcctcaggaagcagagcaatgggagagaagcagaatattcggacaaacacggacagtatctcatcggacatggtactaaggtctacatcgaccccttcacttatgaagaccctaatgaggctgtgagggaatttgcaaaagagatcgatgtctcctacgtcaagattgaagaggtgattggtgcaggtgagtttggcgaggtgtgccgggggcggctcaaggccccagggaagaaggagagctgtgtggcaatcaagaccctgaagggtggctacacggagcggcagcggcgtgagtttctgagcgaggcctccatcatgggccagttcgagcaccccaatatcatccgcctggagggcgtggtcaccaacagcatgcccgtcatgattctcacagagttcatggagaacggcgccctggactccttcctgcggctaaacgacggacagttcacagtcatccagctcgtgggcatgctgcggggcatcgcctcgggcatgcggtaccttgccgagatgagctacgtccaccgagacctggctgctcgcaacatcctagtcaacagcaacctcgtctgcaaagtgtctgactttggcctttcccgattcctggaggagaactcttccgatcccacctacacgagctccctgggaggaaagattcccatccgatggactgccccggaggccattgccttccggaagttcacttccgccagtgatgcctggagttacgggattgtgatgtgggaggtgatgtcatttggggagaggccgtactgggacatgagcaatcaggacgtgatcaatgccattgaacaggactaccggctgcccccgcccccagactgtcccacctccctccaccagctcatgctggactgttggcagaaagaccggaatgcccggccccgcttcccccaggtggtcagcgccctggacaagatgatccggaaccccgccagcctcaaaatcgtggcccgggagaatggcggggcctcacaccctctcctggaccagcggcagcctcactactcagcttttggctctgtgggcgagtggcttcgggccatcaaaatgggaagatacgaagaaagtttcgcagccgctggctttggctccttcgagctggtcagccagatctctgctgaggacctgctccgaatcggagtcactctggcgggacaccagaagaaaatcttggccagtgtccagcacatgaagtcccaggccaagccgggaaccccgggtgggacaggaggaccggccccgcagtactga

SEQ ID NO: 170 - protein, 987 aa, Homo sapiens
  Amino acid sequence of HTK
MELRVLLCWASLAAALEETLLNTKLETADLKWVTFPQVDGQWEELSGLDEEQHSVRTYEVCDVQRAPGQAHWLRTGWVPRRGAVHVYATLRFTMLECLSLPRAGRSCKETFTVFYYESDADTATALTPAWMENPYIKVDTVAAEHLTRKRPGAEATGKVNVKTLRLGPLSKAGFYLAFQDQGACMALLSLHLFYKKCAQLTVNLTRFPETVPRELVVPVAGSCVVDAVPAPGPSPSLYCREDGQWAEQPVTGCSCAPGFEAAEGNTKCRACAQGTFKPLSGEGSCQPCPANSHSNTIGSAVCQCRVGYFRARTDPRGAPCTTPPSAPRSVVSRLNGSSLHLEWSAPLESGGREDLTYALRCRECRPGGSCAPCGGDLTFDPGPRDLVEPWVVVRGLRPDFTYTFEVTALNGVSSLATGPVPFEPVNVTTDREVPPAVSDIRVTRSSPSSLSLAWAVPRAPSGAVLDYEVKYHEKGAEGPSSVRFLKTSENRAELRGLKRGASYLVQVRARSEAGYGPFGQEHHSQTQLDESEGWREQLALIAGTAVVGVVLVLVVIVVAVLCLRKQSNGREAEYSDKHGQYLIGHGTKVYIDPFTYEDPNEAVREFAKEIDVSYVKIEEVIGAGEFGEVCRGRLKAPGKKESCVAIKTLKGGYTERQRREFLSEASIMGQFEHPNIIRLEGVVTNSMPVMILTEFMENGALDSFLRLNDGQFTVIQLVGMLRGIASGMRYLAEMSYVHRDLAARNILVNSNLVCKVSDFGLSRFLEENSSDPTYTSSLGGKIPIRWTAPEAIAFRKFTSASDAWSYGIVMWEVMSFGERPYWDMSNQDVINAIEQDYRLPPPPDCPTSLHQLMLDCWQKDRNARPRFPQVVSALDKMIRNPASLKIVARENGGASHPLLDQRQPHYSAFGSVGEWLRAIKMGRYEESFAAAGFGSFELVSQISAEDLLRIGVTLAGHQKKILASVQHMKSQAKPGTPGGTGGPAPQY

SEQ ID NO: 171 - DNA, 3021 bp, Homo sapiens
  Coding sequence for EPHB6
atggtgtgtagcctatgggtgctgctcctggtgtcttcagttctggctctggaagaggtattgctggacaccaccggagagacatctgagattggctggctcacctacccaccaggggggtgggacgaggtgagtgttctggacgaccagcgacgcctgactcggacctttgaggcatgtcatgtggcaggggcccctccaggcaccgggcaggacaattggttgcagacacactttgtggagcggcgcggggcccagagggcgcacattcgactccacttctctgtgcgggcatgctccagcctgggtgtgagcggcggcacctgccgggagaccttcaccctttactaccgtcaggctgaggagcccgacagccctgacagcgtttcctcctggcacctcaaacgctggaccaaggtggacacaattgcagcagacgagagctttccctcctcctcctcctcctcctcctcttcttcctctgcagcgtgggctgtgggaccccacggggctgggcagcgggctggactgcaactgaacgtcaaagagcggagctttgggcctctcacccaacgcggcttctacgtggccttccaggacacgggggcctgcctggccctggtcgctgtcaggctcttctcctacacctgccctgccgtgctccgatcctttgcttcctttccagagacgcaggccagtggggctgggggggcctccctggtggcagctgtgggcacctgtgtggctcatgcagagccagaggaggatggagtagggggccaggcaggaggcagcccccccaggctgcactgcaacggggagggcaagtggatggtagctgtcgggggctgccgctgccagcctggataccaaccagcacgaggagacaaggcctgccaagcctgcccacgggggctctataagtcttctgctgggaatgctccctgctcaccatgccctgcccgcagtcacgctcccaacccagcagcccccgtttgcccctgcctggagggcttctaccgggccagttccgacccaccagaggccccctgcactggtcctccatcggctccccaggagctttggtttgaggtgcaaggctcagcactcatgctacactggcgcctgcctcgggagctggggggtcgaggggacctgctcttcaatgtcgtgtgcaaggagtgtgaaggccgccaggaacctgccagcggtggtgggggcacttgtcaccgctgcagggatgaggtccacttcgaccctcgccagagaggcctgactgagagccgagtgttagtggggggactccgggcacacgtaccctacatcttagaggtgcaggctgttaatggggtgtctgagctcagccctgaccctcctcaggctgcagccatcaatgtcagcaccagccatgaagtgccctctgctgtccctgtggtgcaccaggtgagccgggcatccaacagcatcacggtgtcctggccgcagcccgaccagaccaatgggaacatcctggactatcagctccgctactatgaccaggcagaagacgaatcccactccttcaccctgaccagcgagaccaacactgccaccgtgacacagctgagccctggccacatctatggtttccaggtgcgggcccggactgctgccggccacggcccctacgggggcaaagtctatttccagacacttcctcaaggggagctgtcttcccagcttccggaaagactctccttggtgatcggctccatcctgggggctttggccttcctcctgctggcagccatcaccgtgctggcggtcgtcttccagcggaagcggcgtgggactggctacacggagcagctgcagcaatacagcagcccaggactcggggtgaagtattacatcgacccctccacctacgaggacccctgtcaggccatccgagaacttgcccgggaagtcgatcctgcttatatcaagattgaggaggtcattgggacaggctcttttggagaagtgcgccagggccgcctgcagccacggggacggagggagcagactgtggccatccaggccctgtgggccgggggcgccgaaagcctgcagatgaccttcctgggccgggccgcagtgctgggtcagttccagcaccccaacatcctgcggctggagggcgtggtcaccaagagccgacccctcatggtgctgacggagttcatggagcttggccccctggacagcttcctcaggcagcgggagggccagttcagcagcctgcagctggtggccatgcagcggggagtggctgctgccatgcagtacctgtccagctttgccttcgtccatcgctcgctgtctgcccacagcgtgctggtgaatagccacttggtgtgcaaggtggcccgtcttggccacagtcctcagggcccaagttgtttgcttcgctgggcagccccagaggtcattgcacatggaaagcatacaacatccagtgatgtctggagctttgggatactcatgtgggaagtgatgagttatggagaacggccttactgggacatgagtgagcaggaggtactaaatgcaatagagcaggagttccggctgcccccgcctccaggctgtcctcctggattacatctacttatgttggacacttggcagaaggaccgtgcccggcggcctcattttgaccagctggtggctgcatttgacaagatgatccgcaagccagataccctgcaggctggcggggacccaggggaaaggccttcccaggcccttctgacccctgtggccctggactttccttgtctggactcaccccaggcctggctttcagccattggactggagtgctaccaggacaacttctccaagtttggcctctgtaccttcagtgatgtggctcagctcagcctagaagacctgcctgccctgggcatcaccctggctggccaccagaagaagctgctgcaccacatccagctccttcagcaacacctgaggcagcagggctcagtggaggtctga

SEQ ID NO: 172 - protein, 1006 aa, Homo sapiens
  Amino acid sequence of MEP
MVCSLWVLLLVSSVLALEEVLLDTTGETSEIGWLTYPPGGWDEVSVLDDQRRLTRTFEACHVAGAPPGTGQDNWLQTHFVERRGAQRAHIRLHFSVRACSSLGVSGGTCRETFTLYYRQAEEPDSPDSVSSWHLKRWTKVDTIAADESFPSSSSSSSSSSSAAWAVGPHGAGQRAGLQLNVKERSFGPLTQRGFYVAFQDTGACLALVAVRLFSYTCPAVLRSFASFPETQASGAGGASLVAAVGTCVAHAEPEEDGVGGQAGGSPPRLHCNGEGKWMVAVGGCRCQPGYQPARGDKACQACPRGLYKSSAGNAPCSPCPARSHAPNPAAPVCPCLEGFYRASSDPPEAPCTGPPSAPQELWFEVQGSALMLHWRLPRELGGRGDLLFNVVCKECEGRQEPASGGGGTCHRCRDEVHFDPRQRGLTESRVLVGGLRAHVPYILEVQAVNGVSELSPDPPQAAAINVSTSHEVPSAVPVVHQVSRASNSITVSWPQPDQTNGNILDYQLRYYDQAEDESHSFTLTSETNTATVTQLSPGHIYGFQVRARTAAGHGPYGGKVYFQTLPQGELSSQLPERLSLVIGSILGALAFLLLAAITVLAVVFQRKRRGTGYTEQLQQYSSPGLGVKYYIDPSTYEDPCQAIRELAREVDPAYIKIEEVIGTGSFGEVRQGRLQPRGRREQTVAIQALWAGGAESLQMTFLGRAAVLGQFQHPNILRLEGVVTKSRPLMVLTEFMELGPLDSFLRQREGQFSSLQLVAMQRGVAAAMQYLSSFAFVHRSLSAHSVLVNSHLVCKVARLGHSPQGPSCLLRWAAPEVIAHGKHTTSSDVWSFGILMWEVMSYGERPYWDMSEQEVLNAIEQEFRLPPPPGCPPGLHLLMLDTWQKDRARRPHFDQLVAAFDKMIRKPDTLQAGGDPGERPSQALLTPVALDFPCLDSPQAWLSAIGLECYQDNFSKFGLCTFSDVAQLSLEDLPALGITLAGHQKKLLHHIQLLQQHLRQQGSVEV

SEQ ID NO: 173 - DNA, 2373 bp, Homo sapiens
  Coding sequence for NTRK1
atgctgcgaggcggacggcgcgggcagcttggctggcacagctgggctgcggggccgggcagcctgctggcttggctgatactggcatctgcgggcgccgcaccctgccccgatgcctgctgcccccacggctcctcgggactgcgatgcacccgggatggggccctggatagcctccaccacctgcccggcgcagagaacctgactgagctctacatcgagaaccagcagcatctgcagcatctggagctccgtgatctgaggggcctgggggagctgagaaacctcaccatcgtgaagagtggtctccgtttcgtggcgccagatgccttccatttcactcctcggctcagtcgcctgaatctctccttcaacgctctggagtctctctcctggaaaactgtgcagggcctctccttacaggaactggtcctgtcggggaaccctctgcactgttcttgtgccctgcgctggctacagcgctgggaggaggagggactgggcggagtgcctgaacagaagctgcagtgtcatgggcaagggcccctggcccacatgcccaatgccagctgtggtgtgcccacgctgaaggtccaggtgcccaatgcctcggtggatgtgggggacgacgtgctgctgcggtgccaggtggaggggcggggcctggagcaggccggctggatcctcacagagctggagcagtcagccacggtgatgaaatctgggggtctgccatccctggggctgaccctggccaatgtcaccagtgacctcaacaggaagaacttgacgtgctgggcagagaacgatgtgggccgggcagaggtctctgttcaggtcaacgtctccttcccggccagtgtgcagctgcacacggcggtggagatgcaccactggtcgatccccttctctgtggatgggcagccggcaccgtctctgcgctggctcttcaatggctccgtgctcaatgagaccagcttcatcttcactgagttcctggagccggcagccaatgagaccgtgcggcacgggtgtctgcgcctcaaccagcccacccacgtcaacaacggcaactacacgctgctggctgccaaccccttcggccaggcctccgcctccatcatggctgccttcatggacaaccctttcgagttcaaccccgaggaccccatccctgacactaacagcacatctggagacccggtggagaagaaggacgaaacaccttttggggtctcggtggctgtgggcctggccgtctttgcctgcctcttcctttctacgctgctccttgtgctcaacaaatgtggacggagaaacaagtttgggatcaaccgcccggctgtgctggctccagaggatgggctggccatgtccctgcatttcatgacattgggtggcagctccctgtcccccaccgagggcaaaggctctgggctccaaggccacatcatcgagaacccacaatacttcagtgatgcctgtgttcaccacatcaagcgccgggacatcgtgctcaagtgggagctgggggagggcgcctttgggaaggtcttccttgctgagtgccacaacctcctgcctgagcaggacaagatgctggtggctgtcaaggcactgaaggaggcgtccgagagtgctcggcaggacttccaacgtgaggctgagctgctcaccatgctgcagcaccagcacatcgtgcgcttcttcggcgtctgcaccgagggccgccccctgctcatggtcttcgagtatatgcggcacggggacctcaaccgcttcctccgatcccatggacccgatgccaagctgctggctggtggggaggatgtggctccaggccccctgggtctggggcagctgctggccgtggctagccaggtcgctgcggggatggtgtacctggcgggtctgcattttgtgcaccgggacctggccacacgcaactgtctagtgggccagggactggtggtcaagattggtgattttggcatgagcagggatatctacagcaccgactattaccgtgtgggaggccgcaccatgctgcccattcgctggatgccgcccgagagcatcctgtaccgtaagttcaccaccgagagcgacgtgtggagcttcggcgtggtgctctgggagatcttcacctacggcaagcagccctggtaccagctctccaacacggaggcaatcgactgcatcacgcagggacgtgagttggagcggccacgtgcctgcccaccagaggtctacgccatcatgcggggctgctggcagcgggagccccagcaacgccacagcatcaaggatgtgcacgcccggctgcaagccctggcccaggcacctcctgtctacctggatgtcctgggctag

SEQ ID NO: 174 - protein, 790 aa, Homo sapiens [sequence omitted]

SEQ ID NO: 175 - DNA, 2469 bp, Homo sapiens
  Coding sequence for NTRK2
atgtcgtcctggataaggtggcatggacccgccatggcgcggctctggggcttctgctggctggttgtgggcttctggagggccgctttcgcctgtcccacgtcctgcaaatgcagtgcctctcggatctggtgcagcgacccttctcctggcatcgtggcatttccgagattggagcctaacagtgtagatcctgagaacatcaccgaaattttcatcgcaaaccagaaaaggttagaaatcatcaacgaagatgatgttgaagcttatgtgggactgagaaatctgacaattgtggattctggattaaaatttgtggctcataaagcatttctgaaaaacagcaacctgcagcacatcaattttacccgaaacaaactgacgagtttgtctaggaaacatttccgtcaccttgacttgtctgaactgatcctggtgggcaatccatttacatgctcctgtgacattatgtggatcaagactctccaagaggctaaatccagtccagacactcaggatttgtactgcctgaatgaaagcagcaagaatattcccctggcaaacctgcagatacccaattgtggtttgccatctgcaaatctggccgcacctaacctcactgtggaggaaggaaagtctatcacattatcctgtagtgtggcaggtgatccggttcctaatatgtattgggatgttggtaacctggtttccaaacatatgaatgaaacaagccacacacagggctccttaaggataactaacatttcatccgatgacagtgggaagcagatctcttgtgtggcggaaaatcttgtaggagaagatcaagattctgtcaacctcactgtgcattttgcaccaactatcacatttctcgaatctccaacctcagaccaccactggtgcattccattcactgtgaaaggcaaccccaaaccagcgcttcagtggttctataacggggcaatattgaatgagtccaaatacatctgtactaaaatacatgttaccaatcacacggagtaccacggctgcctccagctggataatcccactcacatgaacaatggggactacactctaatagccaagaatgagtatgggaaggatgagaaacagatttctgctcacttcatgggctggcctggaattgacgatggtgcaaacccaaattatcctgatgtaatttatgaagattatggaactgcagcgaatgacatcggggacaccacgaacagaagtaatgaaatcccttccacagacgtcactgataaaaccggtcgggaacatctctcggtctatgctgtggtggtgattgcgtctgtggtgggattttgccttttggtaatgctgtttctgcttaagttggcaagacactccaagtttggcatgaaaggcccagcctccgttatcagcaatgatgatgactctgccagcccactccatcacatctccaatgggagtaacactccatcttcttcggaaggtggcccagatgctgtcattattggaatgaccaagatccctgtcattgaaaatccccagtactttggcatcaccaacagtcagctcaagccagacacatttgttcagcacatcaagcgacataacattgttctgaaaagggagctaggcgaaggagcctttggaaaagtgttcctagctgaatgctataacctctgtcctgagcaggacaagatcttggtggcagtgaagaccctgaaggatgccagtgacaatgcacgcaaggacttccaccgtgaggccgagctcctgaccaacctccagcatgagcacatcgtcaagttctatggcgtctgcgtggagggcgaccccctcatcatggtctttgagtacatgaagcatggggacctcaacaagttcctcagggcacacggccctgatgccgtgctgatggctgagggcaacccgcccacggaactgacgcagtcgcagatgctgcatatagcccagcagatcgccgcgggcatggtctacctggcgtcccagcacttcgtgcaccgcgatttggccaccaggaactgcctggtcggggagaacttgctggtgaaaatcggggactttgggatgtcccgggacgtgtacagcactgactactacagggtcggtggccacacaatgctgcccattcgctggatgcctccagagagcatcatgtacaggaaattcacgacggaaagcgacgtctggagcctgggggtcgtgttgtgggagattttcacctatggcaaacagccctggtaccagctgtcaaacaatgaggtgatagagtgtatcactcagggccgagtcctgcagcgaccccgcacgtgcccccaggaggtgtatgagctgatgctggggtgctggcagcgagagccccacatgaggaagaacatcaagggcatccataccctccttcagaacttggccaaggcatctccggtctacctggacattctaggctag

SEQ ID NO: 176 - protein, 822 aa, Homo sapiens
  Amino acid sequence of TRKB
MSSWIRWHGPAMARLWGFCWLVVGFWRAAFACPTSCKCSASRIWCSDPSPGIVAFPRLEPNSVDPENITEIFIANQKRLEIINEDDVEAYVGLRNLTIVDSGLKFVAHKAFLKNSNLQHINFTRNKLTSLSRKHFRHLDLSELILVGNPFTCSCDIMWIKTLQEAKSSPDTQDLYCLNESSKNIPLANLQIPNCGLPSANLAAPNLTVEEGKSITLSCSVAGDPVPNMYWDVGNLVSKHMNETSHTQGSLRITNISSDDSGKQISCVAENLVGEDQDSVNLTVHFAPTITFLESPTSDHHWCIPFTVKGNPKPALQWFYNGAILNESKYICTKIHVTNHTEYHGCLQLDNPTHMNNGDYTLIAKNEYGKDEKQISAHFMGWPGIDDGANPNYPDVIYEDYGTAANDIGDTTNRSNEIPSTDVTDKTGREHLSVYAVVVIASVVGFCLLVMLFLLKLARHSKFGMKGPASVISNDDDSASPLHHISNGSNTPSSSEGGPDAVIIGMTKIPVIENPQYFGITNSQLKPDTFVQHIKRHNIVLKRELGEGAFGKVFLAECYNLCPEQDKILVAVKTLKDASDNARKDFHREAELLTNLQHEHIVKFYGVCVEGDPLIMVFEYMKHGDLNKFLRAHGPDAVLMAEGNPPTELTQSQMLHIAQQIAAGMVYLASQHFVHRDLATRNCLVGENLLVKIGDFGMSRDVYSTDYYRVGGHTMLPIRWMPPESIMYRKFTTESDVWSLGVVLWEIFTYGKQPWYQLSNNEVIECITQGRVLQRPRTCPQEVYELMLGCWQREPHMRKNIKGIHTLLQNLAKASPVYLDILG

SEQ ID NO: 177 - DNA, 2478 bp, Homo sapiens
  Coding sequence for NTRK3
atggatgtctctctttgcccagccaagtgtagtttctggcggattttcttgctgggaagcgtctggctggactatgtgggctccgtgctggcttgccctgcaaattgtgtctgcagcaagactgagatcaattgccggcggccggacgatgggaacctcttccccctcctggaagggcaggattcagggaacagcaatgggaacgccagtatcaacatcacggacatctcaaggaatatcacttccatacacatagagaactggcgcagtcttcacacgctcaacgccgtggacatggagctctacaccggacttcaaaagctgaccatcaagaactcaggacttcggagcattcagcccagagcctttgccaagaacccccatttgcgttatataaacctgtcaagtaaccggctcaccacactctcgtggcagctcttccagacgctgagtcttcgggaattgcagttggagcagaactttttcaactgcagctgtgacatccgctggatgcagctctggcaggagcagggggaggccaagctcaacagccagaacctctactgcatcaacgctgatggctcccagcttcctctcttccgcatgaacatcagtcagtgtgaccttcctgagatcagcgtgagccacgtcaacctgaccgtacgagagggtgacaatgctgttatcacttgcaatggctctggatcaccccttcctgatgtggactggatagtcactgggctgcagtccatcaacactcaccagaccaatctgaactggaccaatgttcatgccatcaacttgacgctggtgaatgtgacgagtgaggacaatggcttcaccctgacgtgcattgcagagaacgtggtgggcatgagcaatgccagtgttgccctcactgtctactatcccccacgtgtggtgagcctggaggagcctgagctgcgcctggagcactgcatcgagtttgtggtgcgtggcaaccccccaccaacgctgcactggctgcacaatgggcagcctctgcgggagtccaagatcatccatgtggaatactaccaagagggagagatttccgagggctgcctgctcttcaacaagcccacccactacaacaatggcaactataccctcattgccaaaaacccactgggcacagccaaccagaccatcaatggccacttcctcaaggagccctttccagagagcacggataactttatcttgtttgacgaagtgagtcccacacctcctatcactgtgacccacaaaccagaagaagacacttttggggtatccatagcagttggacttgctgcttttgcctgtgtcctgttggtggttctcttcgtcatgatcaacaaatatggtcgacggtccaaatttggaatgaagggtcccgtggctgtcatcagtggtgaggaggactcagccagcccactgcaccacatcaaccacggcatcaccacgccctcgtcactggatgcggggcccgacactgtggtcattggcatgactcgcatccctgtcattgagaacccccagtacttccgtcagggacacaactgccacaagccggacacgtatgtgcagcacattaagaggagagacatcgtgctgaagcgagaactgggtgagggagcctttggaaaggtcttcctggccgagtgctacaacctcagcccgaccaaggacaagatgcttgtggctgtgaaggccctgaaggatcccaccctggctgcccggaaggatttccagagggaggccgagctgctcaccaacctgcagcatgagcacattgtcaagttctatggagtgtgcggcgatggggaccccctcatcatggtctttgaatacatgaagcatggagacctgaataagttcctcagggcccatgggccaaatgcaatgatccttgtggatggacagccacgccaggccaagggtgagctggggctctcccaaatgctccacattgccagtcagatcgcctcgggtatggtgtacctggcctcccagcactttgtgcaccgagacctggccaccaggaactgcctggttggagcgaatctgctagtgaagattggggacttcggcatgtccagagatgtctacagcacggattattacagggtgggaggacacaccatgctccccattcgctggatgcctcctgaaagcatcatgtaccggaagttcactacagagagtgatgtatggagcttcggggtgatcctctgggagatcttcacctatggaaagcagccatggttccaactctcaaacacggaggtcattgagtgcattacccaaggtcgtgttttggagcggccccgagtctgccccaaagaggtgtacgatgtcatgctggggtgctggcagagggaaccacagcagcggttgaacatcaaggagatctacaaaatcctccatgctttggggaaggccaccccaatctacctggacattcttggctag

SEQ ID NO: 178 - protein, 825 aa, Homo sapiens
  Amino acid sequence of TRKC
MDVSLCPAKCSFWRIFLLGSVWLDYVGSVLACPANCVCSKTEINCRRPDDGNLFPLLEGQDSGNSNGNASINITDISRNITSIHIENWRSLHTLNAVDMELYTGLQKLTIKNSGLRSIQPRAFAKNPHLRYINLSSNRLTTLSWQLFQTLSLRELQLEQNFFNCSCDIRWMQLWQEQGEAKLNSQNLYCINADGSQLPLFRMNISQCDLPEISVSHVNLTVREGDNAVITCNGSGSPLPDVDWIVTGLQSINTHQTNLNWTNVHAINLTLVNVTSEDNGFTLTCIAENVVGMSNASVALTVYYPPRVVSLEEPELRLEHCIEFVVRGNPPPTLHWLHNGQPLRESKIIHVEYYQEGEISEGCLLFNKPTHYNNGNYTLIAKNPLGTANQTINGHFLKEPFPESTDNFILFDEVSPTPPITVTHKPEEDTFGVSIAVGLAAFACVLLVVLFVMINKYGRRSKFGMKGPVAVISGEEDSASPLHHINHGITTPSSLDAGPDTVVIGMTRIPVIENPQYFRQGHNCHKPDTYVQHIKRRDIVLKRELGEGAFGKVFLAECYNLSPTKDKMLVAVKALKDPTLAARKDFQREAELLTNLQHEHIVKFYGVCGDGDPLIMVFEYMKHGDLNKFLRAHGPNAMILVDGQPRQAKGELGLSQMLHIASQIASGMVYLASQHFVHRDLATRNCLVGANLLVKIGDFGMSRDVYSTDYYRVGGHTMLPIRWMPPESIMYRKFTTESDVWSFGVILWEIFTYGKQPWFQLSNTEVIECITQGRVLERPRVCPKEVYDVMLGCWQREPQQRLNIKEIYKILHALGKATPIYLDILG

SEQ ID NO: 179 - DNA, 1284 bp, Homo sapiens
  Coding sequence for p75
atgggggcaggtgccaccggccgcgccatggacgggccgcgcctgctgctgttgctgcttctgggggtgtcccttggaggtgccaaggaggcatgccccacaggcctgtacacacacagcggtgagtgctgcaaagcctgcaacctgggcgagggtgtggcccagccttgtggagccaaccagaccgtgtgtgagccctgcctggacagcgtgacgttctccgacgtggtgagcgcgaccgagccgtgcaagccgtgcaccgagtgcgtggggctccagagcatgtcggcgccgtgcgtggaggccgacgacgccgtgtgccgctgcgcctacggctactaccaggatgagacgactgggcgctgcgaggcgtgccgcgtgtgcgaggcgggctcgggcctcgtgttctcctgccaggacaagcagaacaccgtgtgcgaggagtgccccgacggcacgtattccgacgaggccaaccacgtggacccgtgcctgccctgcaccgtgtgcgaggacaccgagcgccagctccgcgagtgcacacgctgggccgacgccgagtgcgaggagatccctggccgttggattacacggtccacacccccagagggctcggacagcacagcccccagcacccaggagcctgaggcacctccagaacaagacctcatagccagcacggtggcaggtgtggtgaccacagtgatgggcagctcccagcccgtggtgacccgaggcaccaccgacaacctcatccctgtctattgctccatcctggctgctgtggttgtgggccttgtggcctacatagccttcaagaggtggaacagctgcaagcagaacaagcaaggagccaacagccggccagtgaaccagacgcccccaccagagggagaaaaactccacagcgacagtggcatctccgtggacagccagagcctgcatgaccagcagccccacacgcagacagcctcgggccaggccctcaagggtgacggaggcctctacagcagcctgcccccagccaagcgggaggaggtggagaagcttctcaacggctctgcgggggacacctggcggcacctggcgggcgagctgggctaccagcccgagcacatagactcctttacccatgaggcctgccccgttcgcgccctgcttgcaagctgggccacccaggacagcgccacactggacgccctcctggccgccctgcgccgcatccagcgagccgacctcgtggagagtctgtgcagtgagtccactgccacatccccggtgtga

SEQ ID NO: 180 - protein, 427 aa, Homo sapiens
  Amino acid sequence of NGFR
MGAGATGRAMDGPRLLLLLLLGVSLGGAKEACPTGLYTHSGECCKACNLGEGVAQPCGANQTVCEPCLDSVTFSDVVSATEPCKPCTECVGLQSMSAPCVEADDAVCRCAYGYYQDETTGRCEACRVCEAGSGLVFSCQDKQNTVCEECPDGTYSDEANHVDPCLPCTVCEDTERQLRECTRWADAECEEIPGRWITRSTPPEGSDSTAPSTQEPEAPPEQDLIASTVAGVVTTVMGSSQPVVTRGTTDNLIPVYCSILAAVVVGLVAYIAFKRWNSCKQNKQGANSRPVNQTPPPEGEKLHSDSGISVDSQSLHDQQPHTQTASGQALKGDGGLYSSLPPAKREEVEKLLNGSAGDTWRHLAGELGYQPEHIDSFTHEACPVRALLASWATQDSATLDALLAALRRIQRADLVESLCSESTATSPV

SEQ ID NO: 181 - DNA, 2685 bp, Homo sapiens
  Coding sequence for AXL
atggcgtggcggtgccccaggatgggcagggtcccgctggcctggtgcttggcgctgtgcggctgggcgtgcatggcccccaggggcacgcaggctgaagaaagtcccttcgtgggcaacccagggaatatcacaggtgcccggggactcacgggcacccttcggtgtcagctccaggttcagggagagccccccgaggtacattggcttcgggatggacagatcctggagctcgcggacagcacccagacccaggtgcccctgggtgaggatgaacaggatgactggatagtggtcagccagctcagaatcacctccctgcagctttccgacacgggacagtaccagtgtttggtgtttctgggacatcagaccttcgtgtcccagcctggctatgttgggctggagggcttgccttacttcctggaggagcccgaagacaggactgtggccgccaacacccccttcaacctgagctgccaagctcagggacccccagagcccgtggacctactctggctccaggatgctgtccccctggccacggctccaggtcacggcccccagcgcagcctgcatgttccagggctgaacaagacatcctctttctcctgcgaagcccataacgccaagggggtcaccacatcccgcacagccaccatcacagtgctcccccagcagccccgtaacctccacctggtctcccgccaacccacggagctggaggtggcttggactccaggcctgagcggcatctaccccctgacccactgcaccctgcaggctgtgctgtcagacgatgggatgggcatccaggcgggagaaccagaccccccagaggagcccctcacctcgcaagcatccgtgcccccccatcagcttcggctaggcagcctccatcctcacaccccttatcacatccgcgtggcatgcaccagcagccagggcccctcatcctggacccactggcttcctgtggagacgccggagggagtgcccctgggcccccctgagaacattagtgctacgcggaatgggagccaggccttcgtgcattggcaagagccccgggcgcccctgcagggtaccctgttagggtaccggctggcgtatcaaggccaggacaccccagaggtgctaatggacatagggctaaggcaagaggtgaccctggagctgcagggggacgggtctgtgtccaatctgacagtgtgtgtggcagcctacactgctgctggggatggaccctggagcctcccagtacccctggaggcctggcgcccagggcaagcacagccagtccaccagctggtgaaggaaccttcaactcctgccttctcgtggccctggtggtatgtactgctaggagcagtcgtggccgctgcctgtgtcctcatcttggctctcttccttgtccaccggcgaaagaaggagacccgttatggagaagtgtttgaaccaacagtggaaagaggtgaactggtagtcaggtaccgcgtgcgcaagtcctacagtcgtcggaccactgaagctaccttgaacagcctgggcatcagtgaagagctgaaggagaagctgcgggatgtgatggtggaccggcacaaggtggccctggggaagactctgggagagggagagtttggagctgtgatggaaggccagctcaaccaggacgactccatcctcaaggtggctgtgaagacgatgaagattgccatctgcacgaggtcagagctggaggatttcctgagtgaagcggtctgcatgaaggaatttgaccatcccaacgtcatgaggctcatcggtgtctgtttccagggttctgaacgagagagcttcccagcacctgtggtcatcttacctttcatgaaacatggagacctacacagcttcctcctctattcccggctcggggaccagccagtgtacctgcccactcagatgctagtgaagttcatggcagacatcgccagtggcatggagtatctgagtaccaagagattcatacaccgggacctggcggccaggaactgcatgctgaatgagaacatgtccgtgtgtgtggcggacttcgggctctccaagaagatctacaatggggactactaccgccagggacgtatcgccaagatgccagtcaagtggattgccattgagagtctagctgaccgtgtctacaccagcaagagcgatgtgtggtccttcggggtgacaatgtgggagattgccacaagaggccaaaccccatatccgggcgtggagaacagcgagatttatgactatctgcgccagggaaatcgcctgaagcagcctgcggactgtctggatggactgtatgccttgatgtcgcggtgctgggagctaaatccccaggaccggccaagttttacagagctgcgggaagatttggagaacacactgaaggccttgcctcctgcccaggagcctgacgaaatcctctatgtcaacatggatgagggtggaggttatcctgaaccccctggagctgcaggaggagctgaccccccaacccagccagaccctaaggattcctgtagctgcctcactgcggctgaggtccatcctgctggacgctatgtcctctgcccttccacaacccctagccccgctcagcctgctgataggggctccccagcagccccagggcaggaggatggtgcctga

SEQ ID NO: 182 - protein, 894 aa, Homo sapiens
  Amino acid sequence of UFO
MAWRCPRMGRVPLAWCLALCGWACMAPRGTQAEESPFVGNPGNITGARGLTGTLRCQLQVQGEPPEVHWLRDGQILELADSTQTQVPLGEDEQDDWIVVSQLRITSLQLSDTGQYQCLVFLGHQTFVSQPGYVGLEGLPYFLEEPEDRTVAANTPFNLSCQAQGPPEPVDLLWLQDAVPLATAPGHGPQRSLHVPGLNKTSSFSCEAHNAKGVTTSRTATITVLPQQPRNLHLVSRQPTELEVAWTPGLSGIYPLTHCTLQAVLSDDGMGIQAGEPDPPEEPLTSQASVPPHQLRLGSLHPHTPYHIRVACTSSQGPSSWTHWLPVETPEGVPLGPPENISATRNGSQAFVHWQEPRAPLQGTLLGYRLAYQGQDTPEVLMDIGLRQEVTLELQGDGSVSNLTVCVAAYTAAGDGPWSLPVPLEAWRPGQAQPVHQLVKEPSTPAFSWPWWYVLLGAVVAAACVLILALFLVHRRKKETRYGEVFEPTVERGELVVRYRVRKSYSRRTTEATLNSLGISEELKEKLRDVMVDRHKVALGKTLGEGEFGAVMEGQLNQDDSILKVAVKTMKIAICTRSELEDFLSEAVCMKEFDHPNVMRLIGVCFQGSERESFPAPVVILPFMKHGDLHSFLLYSRLGDQPVYLPTQMLVKFMADIASGMEYLSTKRFIHRDLAARNCMLNENMSVCVADFGLSKKIYNGDYYRQGRIAKMPVKWIAIESLADRVYTSKSDVWSFGVTMWEIATRGQTPYPGVENSEIYDYLRQGNRLKQPADCLDGLYALMSRCWELNPQDRPSFTELREDLENTLKALPPAQEPDEILYVNMDEGGGYPEPPGAAGGADPPTQPDPKDSCSCLTAAEVHPAGRYVLCPSTTPSPAQPADRGSPAAPGQEDGA

SEQ ID NO: 183 - DNA, 3000 bp, Homo sapiens
  Coding sequence for MER
atggggccggccccgctgccgctgctgctgggcctcttcctccccgcgctctggcgtagagctatcactgaggcaagggaagaagccaagccttacccgctattcccgggaccttttccagggagcctgcaaactgaccacacaccgctgttatcccttcctcacgccagtgggtaccagcctgccttgatgttttcaccaacccagcctggaagaccacatacaggaaacgtagccattccccaggtgacctctgtcgaatcaaagcccctaccgcctcttgccttcaaacacacagttggacacataatactttctgaacataaaggtgtcaaatttaattgctcaatcaatgtacctaatatataccaggacaccacaatttcttggtggaaagatgggaaggaattgcttgggggacatcatcgaattacacagttttatccagatgatgaagttacagcaataatcgcttccttcagcataaccagtgtgcagcgttcagacaatgggtcgtatatctgtaagatgaaaataaacaatgaagagatcgtgtctgatcccatctacatcgaagtacaaggacttcctcactttactaagcagcctgagagcatgaatgtcaccagaaacacagccttcaacctcacctgtcaggctgtgggcccgcctgagcccgtcaacattttctgggttcaaaacagtagccgtgttaacgaacagcctgaaaaatcccccggcgtgctaactgttccaggcctgacggagatggcggtcttcagttgtgaggcccacaatgacaaagggctgaccgtgtcccagggagtgcagatcaacatcaaagcaattccctccccaccaactgaagtcagcatccgtaacagcactgcacacagcattctgatctcctgggttcctggttttgatggatactccccgttcaggaattgcagcattcaggtcaaggaagctgatccgctgggtaatggctcagtcatgatttttaacacctctgccttaccacatctgtaccaaatcaagcagctgcaagccctggctaattacagcattggtgtttcctgcatgaatgaaataggctggtctgcagtgagcccttggattctagcaagcacgactgaaggagccccatcagtagcacctttaaatgtcactgtgtttctgaatgaatctagtgataatgtggacatcagatggatgaagcctccgactaagcagcaggatggagaactggtgggctaccggatatcccacgtgtggcagagtgcagggatttccaaagagctcttggaggaagttggccagaatggcagccgagctcggatctctgttcaagtccacaatgctacgtgcacagtgaggattgcagccgtcaccagagggggagttgggcccttcagtgatccagtgaaaatatttatccctgcacacggttgggtagattatgccccctcttcaactccggcgcctggcaacgcagatcctgtgctcatcatctttggctgcttttgtggatttattttgattgggttgattttatacatctccttggccatcagaaaaagagtccaggagacaaagtttgggaatgcattcacagaggaggattctgaattagtggtgaattatatagcaaagaaatccttctgtcggcgagccattgaacttaccttacatagcttgggagtcagtgaggaactacaaaataaactagaagatgttgtgattgacaggaatcttctaattcttggaaaaattctgggtgaaggagagtttgggtctgtaatggaaggaaatcttaagcaggaagatgggacctctctgaaagtggcagtgaagaccatgaagttggacaactcttcacatcgggagatcgaggagtttctcagtgaggcagcgtgcatgaaagacttcagccacccaaatgtcattcgacttctaggtgtgtgtatagaaatgagctctcaaggcatcccaaagcccatggtaattttacccttcatgaaatacggggacctgcatacttacttactttattcccgattggagacaggaccaaagcatattcctctgcagacactattgaagttcatggtggatattgccctgggaatggagtatctgagcaacaggaattttcttcatcgagatttagctgctcgaaactgcatgttgcgagatgacatgactgtctgtgttgcggacttcggcctctctaagaagatttacagtggcgattattaccgccaaggccgcattgctaagatgcctgttaaatggatcgccatagaaagtcttgcagaccgagtctacacaagtaaaagtgatgtgtgggcatttggcgtgaccatgtgggaaatacgtacgcggggaatgactccctatcctggggtccagaaccatgagatgtatgactatcttctccatggccacaggttgaagcagcccgaagactgcctggatgaactgtatgaaataatgtactcttgctggagaaccgatcccttagaccgccccaccttttcagtattgaggctgcagctagaaaaactcttagaaagtttgcctgacgttcggaaccaagcagacgttatttacgtcaatacacagttgctggagagctctgagggcctggcccagggccccacccttgctccactggacttgaacatcgaccctgactctataattgcctcctgcactccccgcgctgccatcagtgtggtcacagcagaagttcatgacagcaaacctcatgaaggacggtacatcctgaatgggggcagtgaggaatgggaagatctgacttctgccccctctgctgcagtcacagctgaaaagaacagtgttttaccgggggagagacttgttaggaatggggtctcctggtcccattcgagcatgctgcccttgggaagctcattgcccgatgaacttttgtttgctgacgactcctcagaaggctcagaagtcctgatgtga

SEQ ID NO: 184 - protein, 999 aa, Homo sapiens
  Amino acid sequence of NYK
MGPAPLPLLLGLFLPALWRRAITEAREEAKPYPLFPGPFPGSLQTDHTPLLSLPHASGYQPALMFSPTQPGRPHTGNVAIPQVTSVESKPLPPLAFKHTVGHIILSEHKGVKFNCSINVPNIYQDTTISWWKDGKELLGGHHRITQFYPDDEVTAIIASFSITSVQRSDNGSYICKMKINNEEIVSDPIYIEVQGLPHFTKQPESMNVTRNTAFNLTCQAVGPPEPVNIFWVQNSSRVNEQPEKSPGVLTVPGLTEMAVFSCEAHNDKGLTVSQGVQINIKAIPSPPTEVSIRNSTAHSILISWVPGFDGYSPFRNCSIQVKEADPLGNGSVMIFNTSALPHLYQIKQLQALANYSIGVSCMNEIGWSAVSPWILASTTEGAPSVAPLNVTVFLNESSDNVDIRWMKPPTKQQDGELVGYRISHVWQSAGISKELLEEVGQNGSRARISVQVHNATCTVRIAAVTRGGVGPFSDPVKIFIPAHGWVDYAPSSTPAPGNADPVLIIFGCFCGFILIGLILYISLAIRKRVQETKFGNAFTEEDSELVVNYIAKKSFCRRAIELTLHSLGVSEELQNKLEDVVIDRNLLILGKILGEGEFGSVMEGNLKQEDGTSLKVAVKTMKLDNSSHREIEEFLSEAACMKDFSHPNVIRLLGVCIEMSSQGIPKPMVILPFMKYGDLHTYLLYSRLETGPKHIPLQTLLKFMVDIALGMEYLSNRNFLHRDLAARNCMLRDDMTVCVADFGLSKKIYSGDYYRQGRIAKMPVKWIAIESLADRVYTSKSDVWAFGVTMWEIRTRGMTPYPGVQNHEMYDYLLHGHRLKQPEDCLDELYEIMYSCWRTDPLDRPTFSVLRLQLEKLLESLPDVRNQADVIYVNTQLLESSEGLAQGPTLAPLDLNIDPDSIIASCTPRAAISVVTAEVHDSKPHEGRYILNGGSEEWEDLTSAPSAAVTAEKNSVLPGERLVRNGVSWSHSSMLPLGSSLPDELLFADDSSEGSEVLM

SEQ ID NO: 185 - DNA, 2673 bp, Homo sapiens
  Coding sequence for TYR03
atggcgctgaggcggagcatggggcggccggggctcccgccgctgccgctgccgccgccaccgcggctcgggctgctgctggcggctctggcttctctgctgctcccggagtccgccgccgcaggtctgaagctcatgggagccccggtgaagctgacagtgtctcaggggcagccggtgaagctcaactgcagtgtggaggggatggaggagcctgacatccagtgggtgaaggatggggctgtggtccagaacttggaccagttgtacatcccagtcagcgagcagcactggatcggcttcctcagcctgaagtcagtggagcgctctgacgccggccggtactggtgccaggtggaggatgggggtgaaaccgagatctcccagccagtgtggctcacggtagaaggtgtgccatttttcacagtggagccaaaagatctggcagtgccacccaatgcccctttccaactgtcttgtgaggctgtgggtccccctgaacctgttaccattgtctggtggagaggaactacgaagatcgggggacccgctccctctccatctgttttaaatgtaacaggggtgacccagagcaccatgttttcctgtgaagctcacaacctaaaaggcctggcctcttctcgcacagccactgttcaccttcaagcactgcctgcagcccccttcaacatcaccgtgacaaagctttccagcagcaacgctagtgtggcctggatgccaggtgctgatggccgagctctgctacagtcctgtacagttcaggtgacacaggccccaggaggctgggaagtcctggctgttgtggtccctgtgcccccctttacctgcctgctccgggacctggtgcctgccaccaactacagcctcagggtgcgctgtgccaatgccttggggccctctccctatgctgactgggtgccctttcagaccaagggtctagccccagccagcgctccccaaaacctccatgccatccgcacagattcaggcctcatcttggagtgggaagaagtgatccccgaggcccctttggaaggccccctgggaccctacaaactgtcctgggttcaagacaatggaacccaggatgagctgacagtggaggggaccagggccaatttgacaggctgggatccccaaaaggacctgatcgtacgtgtgtgcgtctccaatgcagttggctgtggaccctggagtcagccactggtggtctcttctcatgaccgtgcaggccagcagggccctcctcacagccgcacatcctgggtacctgtggtccttggtgtgctaacggccctggtgacggctgctgccctggccctcatcctgcttcgaaagagacggaaagagacgcggtttgggcaagcctttgacagtgtcatggcccggggagagccagccgttcacttccgggcagcccggtccttcaatcgagaaaggcccgagcgcatcgaggccacattggacagcttgggcatcagcgatgaactaaaggaaaaactggaggatgtgctcatcccagagcagcagttcaccctgggccggatgttgggcaaaggagagtttggttcagtgcgggaggcccagctgaagcaagaggatggctcctttgtgaaagtggctgtgaagatgctgaaagctgacatcattgcctcaagcgacattgaagagttcctcagggaagcagcttgcatgaaggagtttgaccatccacacgtggccaaacttgttggggtaagcctccggagcagggctaaaggccgtctccccatccccatggtcatcttgcccttcatgaagcatggggacctgcatgccttcctgctcgcctcccggattggggagaacccctttaacctacccctccagaccctgatccggttcatggtggacattgcctgcggcatggagtacctgagctctcggaacttcatccaccgagacctggctgctcggaattgcatgctggcagaggacatgacagtgtgtgtggctgacttcggactctcccggaagatctacagtggggactactatcgtcaaggctgtgcctccaaactgcctgtcaagtggctggccctggagagcctggccgacaacctgtatactgtgcagagtgacgtgtgggcgttcggggtgaccatgtgggagatcatgacacgtgggcagacgccatatgctggcatcgaaaacgctgagatttacaactacctcattggcgggaaccgcctgaaacagcctccggagtgtatggaggacgtgtatgatctcatgtaccagtgctggagtgctgaccccaagcagcgcccgagctttacttgtctgcgaatggaactggagaacatcttgggccagctgtctgtgctatctgccagccaggaccccttatacatcaacatcgagagagctgaggagcccactgcgggaggcagcctggagctacctggcagggatcagccctacagtggggctggggatggcagtggcatgggggcagtgggtggcactcccagtgactgtcggtacatactcacccccggagggctggctgagcagccagggcaggcagagcaccagccagagagtcccctcaatgagacacagaggcttttgctgctgcagcaagggctactgccacacagtagctgttag

SEQ ID NO: 186 - protein, 890 aa, Homo sapiens
  Amino acid sequence of SKY
MALRRSMGRPGLPPLPLPPPPRLGLLLAALASLLLPESAAAGLKLMGAPVKLTVSQGQPVKLNCSVEGMEEPDIQWVKDGAVVQNLDQLYIPVSEQHWIGFLSLKSVERSDAGRYWCQVEDGGETEISQPVWLTVEGVPFFTVEPKDLAVPPNAPFQLSCEAVGPPEPVTIVWWRGTTKIGGPAPSPSVLNVTGVTQSTMFSCEAHNLKGLASSRTATVHLQALPAAPFNITVTKLSSSNASVAWMPGADGRALLQSCTVQVTQAPGGWEVLAVVVPVPPFTCLLRDLVPATNYSLRVRCANALGPSPYADWVPFQTKGLAPASAPQNLHAIRTDSGLILEWEEVIPEAPLEGPLGPYKLSWVQDNGTQDELTVEGTRANLTGWDPQKDLIVRVCVSNAVGCGPWSQPLVVSSHDRAGQQGPPHSRTSWVPVVLGVLTALVTAAALALILLRKRRKETRFGQAFDSVMARGEPAVHFRAARSFNRERPERIEATLDSLGISDELKEKLEDVLIPEQQFTLGRMLGKGEFGSVREAQLKQEDGSFVKVAVKMLKADIIASSDIEEFLREAACMKEFDHPHVAKLVGVSLRSRAKGRLPIPMVILPFMKHGDLHAFLLASRIGENPFNLPLQTLIRFMVDIACGMEYLSSRNFIHRDLAARNCMLAEDMTVCVADFGLSRKIYSGDYYRQGCASKLPVKWLALESLADNLYTVQSDVWAFGVTMWEIMTRGQTPYAGIENAEIYNYLIGGNRLKQPPECMEDVYDLMYQCWSADPKQRPSFTCLRMELENILGQLSVLSASQDPLYINIERAEEPTAGGSLELPGRDQPYSGAGDGSGMGAVGGTPSDCRYILTPGGLAEQPGQAEHQPESPLNETQRLLLLQQGLLPHSSC

SEQ ID NO: 187 - DNA, 3417 bp, Homo sapiens
  Coding sequence for TIE1
atggtctggcgggtgccccctttcttgctccccatcctcttcttggcttctcatgtgggcgcggcggtggacctgacgctgctggccaacctgcggctcacggacccccagcgcttcttcctgacttgcgtgtctggggaggccggggcggggaggggctcggacgcctggggcccgcccctgctgctggagaaggacgaccgtatcgtgcgcaccccgcccgggccacccctgcgcctggcgcgcaacggttcgcaccaggtcacgcttcgcggcttctccaagccctcggacctcgtgggcgtcttctcctgcgtgggcggtgctggggcgcggcgcacgcgcgtcatctacgtgcacaacagccctggagcccacctgcttccagacaaggtcacacacactgtgaacaaaggtgacaccgctgtactttctgcacgtgtgcacaaggagaagcagacagacgtgatctggaagagcaacggatcctacttctacaccctggactggcatgaagcccaggatgggcggttcctgctgcagctcccaaatgtgcagccaccatcgagcggcatctacagtgccacttacctggaagccagccccctgggcagcgccttctttcggctcatcgtgcggggttgtggggctgggcgctgggggccaggctgtaccaaggagtgcccaggttgcctacatggaggtgtctgccacgaccatgacggcgaatgtgtatgcccccctggcttcactggcacccgctgtgaacaggcctgcagagagggccgttttgggcagagctgccaggagcagtgcccaggcatatcaggctgccggggcctcaccttctgcctcccagacccctatggctgctcttgtggatctggctggagaggaagccagtgccaagaagcttgtgcccctggtcattttggggctgattgccgactccagtgccagtgtcagaatggtggcacttgtgaccggttcagtggttgtgtctgcccctctgggtggcatggagtgcactgtgagaagtcagaccggatcccccagatcctcaacatggcctcagaactggagttcaacttagagacgatgccccggatcaactgtgcagctgcagggaaccccttccccgtgcggggcagcatagagctacgcaagccagacggcactgtgctcctgtccaccaaggccattgtggagccagagaagaccacagctgagttcgaggtgccccgcttggttcttgcggacagtgggttctgggagtgccgtgtgtccacatctggcggccaagacagccggcgcttcaaggtcaatgtgaaagtgccccccgtgcccctggctgcacctcggctcctgaccaagcagagccgccagcttgtggtctccccgctggtctcgttctctggggatggacccatctccactgtccgcctgcactaccggccccaggacagtaccatggactggtcgaccattgtggtggaccccagtgagaacgtgacgttaatgaacctgaggccaaagacaggatacagtgttcgtgtgcagctgagccggccaggggaaggaggagagggggcctgggggcctcccaccctcatgaccacagactgtcctgagcctttgttgcagccgtggttggagggctggcatgtggaaggcactgaccggctgcgagtgagctggtccttgcccttggtgcccgggccactggtgggcgacggtttcctgctgcgcctgtgggacgggacacgggggcaggagcggcgggagaacgtctcatccccccaggcccgcactgccctcctgacgggactcacgcctggcacccactaccagctggatgtgcagctctaccactgcaccctcctgggcccggcctcgccccctgcacacgtgcttctgccccccagtgggcctccagccccccgacacctccacgcccaggccctctcagactccgagatccagctgacatggaagcacccggaggctctgcctgggccaatatccaagtacgttgtggaggtgcaggtggctgggggtgcaggagacccactgtggatagacgtggacaggcctgaggagacaagcaccatcatccgtggcctcaacgccagcacgcgctacctcttccgcatgcgggccagcattcaggggctcggggactggagcaacacagtagaagagtccaccctgggcaacgggctgcaggctgagggcccagtccaagagagccgggcagctgaagagggcctggatcagcagctgatcctggcggtggtgggctccgtgtctgccacctgcctcaccatcctggccgcccttttaaccctggtgtgcatccgcagaagctgcctgcatcggagacgcaccttcacctaccagtcaggctcgggcgaggagaccatcctgcagttcagctcagggaccttgacacttacccggcggccaaaactgcagcccgagcccctgagctacccagtgctagagtgggaggacatcacctttgaggacctcatcggggaggggaacttcggccaggtcatccgggccatgatcaagaaggacgggctgaagatgaacgcagccatcaaaatgctgaaagagtatgcctctgaaaatgaccatcgtgactttgcgggagaactggaagttctgtgcaaattggggcatcaccccaacatcatcaacctcctgggggcctgtaagaaccgaggttacttgtatatcgctattgaatatgccccctacgggaacctgctagattttctgcggaaaagccgggtcctagagactgacccagcttttgctcgagagcatgggacagcctctacccttagctcccggcagctgctgcgtttcgccagtgatgcggccaatggcatgcagtacctgagtgagaagcagttcatccacagggacctggctgcccggaatgtgctggtcggagagaacctagcctccaagattgcagacttcggcctttctcggggagaggaggtttatgtgaagaagacgatggggcgtctccctgtgcgctggatggccattgagtccctgaactacagtgtctataccaccaagagtgatgtctggtcctttggagtccttctttgggagatagtgagccttggaggtacaccctactgtggcatgacctgtgccgagctctatgaaaagctgccccagggctaccgcatggagcagcctcgaaactgtgacgatgaagtgtacgagctgatgcgtcagtgctggcgggaccgtccctatgagcgacccccctttgcccagattgcgctacagctaggccgcatgctggaagccaggaaggcctatgtgaacatgtcgctgtttgagaacttcacttacgcgggcattgatgccacagctgaggaggcctga

SEQ ID NO: 188 - protein, 1138 aa, Homo sapiens
  Amino acid sequence of TIE
MVWRVPPFLLPILFLASHVGAAVDLTLLANLRLTDPQRFFLTCVSGEAGAGRGSDAWGPPLLLEKDDRIVRTPPGPPLRLARNGSHQVTLRGFSKPSDLVGVFSCVGGAGARRTRVIYVHNSPGAHLLPDKVTHTVNKGDTAVLSARVHKEKQTDVIWKSNGSYFYTLDWHEAQDGRFLLQLPNVQPPSSGIYSATYLEASPLGSAFFRLIVRGCGAGRWGPGCTKECPGCLHGGVCHDHDGECVCPPGFTGTRCEQACREGRFGQSCQEQCPGISGCRGLTFCLPDPYGCSCGSGWRGSQCQEACAPGHFGADCRLQCQCQNGGTCDRFSGCVCPSGWHGVHCEKSDRIPQILNMASELEFNLETMPRINCAAAGNPFPVRGSIELRKPDGTVLLSTKAIVEPEKTTAEFEVPRLVLADSGFWECRVSTSGGQDSRRFKVNVKVPPVPLAAPRLLTKQSRQLVVSPLVSFSGDGPISTVRLHYRPQDSTMDWSTIVVDPSENVTLMNLRPKTGYSVRVQLSRPGEGGEGAWGPPTLMTTDCPEPLLQPWLEGWHVEGTDRLRVSWSLPLVPGPLVGDGFLLRLWDGTRGQERRENVSSPQARTALLTGLTPGTHYQLDVQLYHCTLLGPASPPAHVLLPPSGPPAPRHLHAQALSDSEIQLTWKHPEALPGPISKYVVEVQVAGGAGDPLWIDVDRPEETSTIIRGLNASTRYLFRMRASIQGLGDWSNTVEESTLGNGLQAEGPVQESRAAEEGLDQQLILAVVGSVSATCLTILAALLTLVCIRRSCLHRRRTFTYQSGSGEETILQFSSGTLTLTRRPKLQPEPLSYPVLEWEDITFEDLIGEGNFGQVIRAMIKKDGLKMNAAIKMLKEYASENDHRDFAGELEVLCKLGHHPNIINLLGACKNRGYLYIAIEYAPYGNLLDFLRKSRVLETDPAFAREHGTASTLSSRQLLRFASDAANGMQYLSEKQFIHRDLAARNVLVGENLASKIADFGLSRGEEVYVKKTMGRLPVRWMAIESLNYSVYTTKSDVWSFGVLLWEIVSLGGTPYCGMTCAELYEKLPQGYRMEQPRNCDDEVYELMRQCWRDRPYERPPFAQIALQLGRMLEARKAYVNMSLFENFTYAGIDATAEEA

SEQ ID NO: 189 - DNA, 3375 bp, Homo sapiens
  Coding sequence for TIE2
atggactctttagccagcttagttctctgtggagtcagcttgctcctttctggaactgtggaaggtgccatggacttgatcttgatcaattccctacctcttgtatctgatgctgaaacatctctcacctgcattgcctctgggtggcgcccccatgagcccatcaccataggaagggactttgaagccttaatgaaccagcaccaggatccgctggaagttactcaagatgtgaccagagaatgggctaaaaaagttgtttggaagagagaaaaggctagtaagatcaatggtgcttatttctgtgaagggcgagttcgaggagaggcaatcaggatacgaaccatgaagatgcgtcaacaagcttccttcctaccagctactttaactatgactgtggacaagggagataacgtgaacatatctttcaaaaaggtattgattaaagaagaagatgcagtgatttacaaaaatggttccttcatccattcagtgccccggcatgaagtacctgatattctagaagtacacctgcctcatgctcagccccaggatgctggagtgtactcggccaggtatataggaggaaacctcttcacctcggccttcaccaggctgatagtccggagatgtgaagcccagaagtggggacctgaatgcaaccatctctgtactgcttgtatgaacaatggtgtctgccatgaagatactggagaatgcatttgccctcctgggtttatgggaaggacgtgtgagaaggcttgtgaactgcacacgtttggcagaacttgtaaagaaaggtgcagtggacaagagggatgcaagtcttatgtgttctgtctccctgacccctatgggtgttcctgtgccacaggctggaagggtctgcagtgcaatgaagcatgccaccctggtttttacgggccagattgtaagcttaggtgcagctgcaacaatggggagatgtgtgatcgcttccaaggatgtctctgctctccaggatggcaggggctccagtgtgagagagaaggcataccgaggatgaccccaaagatagtggatttgccagatcatatagaagtaaacagtggtaaatttaatcccatttgcaaagcttctggctggccgctacctactaatgaagaaatgaccctggtgaagccggatgggacagtgctccatccaaaagactttaaccatacggatcatttctcagtagccatattcaccatccaccggatcctcccccctgactcaggagtttgggtctgcagtgtgaacacagtggctgggatggtggaaaagcccttcaacatttctgttaaagttcttccaaagcccctgaatgccccaaacgtgattgacactggacataactttgctgtcatcaacatcagctctgagccttactttggggatggaccaatcaaatccaagaagcttctatacaaacccgttaatcactatgaggcttggcaacatattcaagtgacaaatgagattgttacactcaactatttggaacctcggacagaatatgaactctgtgtgcaactggtccgtcgtggagagggtggggaagggcatcctggacctgtgagacgcttcacaacagcttctatcggactccctcctccaagaggtctaaatctcctgcctaaaagtcagaccactctaaatttgacctggcaaccaatatttccaagctcggaagatgacttttatgttgaagtggagagaaggtctgtgcaaaaaagtgatcagcagaatattaaagttccaggcaacttgacttcggtgctacttaacaacttacatcccagggagcagtacgtggtccgagctagagtcaacaccaaggcccagggggaatggagtgaagatctcactgcttggacccttagtgacattcttcctcctcaaccagaaaacatcaagatttccaacattacacactcctcggctgtgatttcttggacaatattggatggctattctatttcttctattactatccgttacaaggttcaaggcaagaatgaagaccagcacgttgatgtgaagataaagaatgccaccatcattcagtatcagctcaagggcctagagcctgaaacagcataccaggtggacatttttgcagagaacaacatagggtcaagcaacccagccttttctcatgaactggtgaccctcccagaatctcaagcaccagcggacctcggaggggggaagatgctgcttatagccatccttggctctgctggaatgacctgcctgactgtgctgttggcctttctgatcatattgcaattgaagagggcaaatgtgcaaaggagaatggcccaagccttccaaaacgtgagggaagaaccagctgtgcagttcaactcagggactctggccctaaacaggaaggtcaaaaacaacccagatcctacaatttatccagtgcttgactggaatgacatcaaatttcaagatgtgattggggagggcaattttggccaagttcttaaggcgcgcatcaagaaggatgggttacggatggatgctgccatcaaaagaatgaaagaatatgcctccaaagatgatcacagggactttgcaggagaactggaagttctttgtaaacttggacaccatccaaacatcatcaatctcttaggagcatgtgaacatcgaggctacttgtacctggccattgagtacgcgccccatggaaaccttctggacttccttcgcaagagccgtgtgctggagacggacccagcatttgccattgccaatagcaccgcgtccacactgtcctcccagcagctccttcacttcgctgccgacgtggcccggggcatggactacttgagccaaaaacagtttatccacagggatctggctgccagaaacattttagttggtgaaaactatgtggcaaaaatagcagattttggattgtcccgaggtcaagaggtgtacgtgaaaaagacaatgggaaggctcccagtgcgctggatggccatcgagtcactgaattacagtgtgtacacaaccaacagtgatgtatggtcctatggtgtgttactatgggagattgttagcttaggaggcacaccctactgcgggatgacttgtgcagaactctacgagaagctgccccagggctacagactggagaagcccctgaactgtgatgatgaggtgtatgatctaatgagacaatgctggcgggagaagccttatgagaggccatcatttgcccagatattggtgtccttaaacagaatgttagaggagcgaaagacctacgtgaataccacgctttatgagaagtttacttatgcaggaattgactgttctgctgaagaagcggcctag

SEQ ID NO: 190 - protein, 1124 aa, Homo sapiens
  Amino acid sequence of TEK
MDSLASLVLCGVSLLLSGTVEGAMDLILINSLPLVSDAETSLTCIASGWRPHEPITIGRDFEALMNQHQDPLEVTQDVTREWAKKVVWKREKASKINGAYFCEGRVRGEAIRIRTMKMRQQASFLPATLTMTVDKGDNVNISFKKVLIKEEDAVIYKNGSFIHSVPRHEVPDILEVHLPHAQPQDAGVYSARYIGGNLFTSAFTRLIVRRCEAQKWGPECNHLCTACMNNGVCHEDTGECICPPGFMGRTCEKACELHTFGRTCKERCSGQEGCKSYVFCLPDPYGCSCATGWKGLQCNEACHPGFYGPDCKLRCSCNNGEMCDRFQGCLCSPGWQGLQCEREGIPRMTPKIVDLPDHIEVNSGKFNPICKASGWPLPTNEEMTLVKPDGTVLHPKDFNHTDHFSVAIFTIHRILPPDSGVWVCSVNTVAGMVEKPFNISVKVLPKPLNAPNVIDTGHNFAVINISSEPYFGDGPIKSKKLLYKPVNHYEAWQHIQVTNEIVTLNYLEPRTEYELCVQLVRRGEGGEGHPGPVRRFTTASIGLPPPRGLNLLPKSQTTLNLTWQPIFPSSEDDFYVEVERRSVQKSDQQNIKVPGNLTSVLLNNLHPREQYVVRARVNTKAQGEWSEDLTAWTLSDILPPQPENIKISNITHSSAVISWTILDGYSISSITIRYKVQGKNEDQHVDVKIKNATIIQYQLKGLEPETAYQVDIFAENNIGSSNPAFSHELVTLPESQAPADLGGGKMLLIAILGSAGMTCLTVLLAFLIILQLKRANVQRRMAQAFQNVREEPAVQFNSGTLALNRKVKNNPDPTIYPVLDWNDIKFQDVIGEGNFGQVLKARIKKDGLRMDAAIKRMKEYASKDDHRDFAGELEVLCKLGHHPNIINLLGACEHRGYLYLAIEYAPHGNLLDFLRKSRVLETDPAFAIANSTASTLSSQQLLHFAADVARGMDYLSQKQFIHRDLAARNILVGENYVAKIADFGLSRGQEVYVKKTMGRLPVRWMAIESLNYSVYTTNSDVWSYGVLLWEIVSLGGTPYCGMTCAELYEKLPQGYRLEKPLNCDDEVYDLMRQCWREKPYERPSFAQILVSLNRMLEERKTYVNTTLYEKFTYAGIDCSAEEAA

SEQ ID NO: 191 - DNA, 4227 bp, Homo sapiens
  Coding sequence for MET
atgaaggcccccgctgtgcttgcacctggcatcctcgtgctcctgtttaccttggtgcagaggagcaatggggagtgtaaagaggcactagcaaagtccgagatgaatgtgaatatgaagtatcagcttcccaacttcaccgcggaaacacccatccagaatgtcattctacatgagcatcacattttccttggtgccactaactacatttatgttttaaatgaggaagaccttcagaaggttgctgagtacaagactgggcctgtgctggaacacccagattgtttcccatgtcaggactgcagcagcaaagccaatttatcaggaggtgtttggaaagataacatcaacatggctctagttgtcgacacctactatgatgatcaactcattagctgtggcagcgtcaacagagggacctgccagcgacatgtctttccccacaatcatactgctgacatacagtcggaggttcactgcatattctccccacagatagaagagcccagccagtgtcctgactgtgtggtgagcgccctgggagccaaagtcctttcatctgtaaaggaccggttcatcaacttctttgtaggcaataccataaattcttcttatttcccagatcatccattgcattcgatatcagtgagaaggctaaaggaaacgaaagatggttttatgtttttgacggaccagtcctacattgatgttttacctgagttcagagattcttaccccattaagtatgtccatgcctttgaaagcaacaattttatttacttcttgacggtccaaagggaaactctagatgctcagacttttcacacaagaataatcaggttctgttccataaactctggattgcattcctacatggaaatgcctctggagtgtattctcacagaaaagagaaaaaagagatccacaaagaaggaagtgtttaatatacttcaggctgcgtatgtcagcaagcctggggcccagcttgctagacaaataggagccagcctgaatgatgacattcttttcggggtgttcgcacaaagcaagccagattctgccgaaccaatggatcgatctgccatgtgtgcattccctatcaaatatgtcaacgacttcttcaacaagatcgtcaacaaaaacaatgtgagatgtctccagcatttttacggacccaatcatgagcactgctttaataggacacttctgagaaattcatcaggctgtgaagcgcgccgtgatgaatatcgaacagagtttaccacagctttgcagcgcgttgacttattcatgggtcaattcagcgaagtcctcttaacatctatatccaccttcattaaaggagacctcaccatagctaatcttgggacatcagagggtcgcttcatgcaggttgtggtttctcgatcaggaccatcaacccctcatgtgaattttctcctggactcccatccagtgtctccagaagtgattgtggagcatacattaaaccaaaatggctacacactggttatcactgggaagaagatcacgaagatcccattgaatggcttgggctgcagacatttccagtcctgcagtcaatgcctctctgccccaccctttgttcagtgtggctggtgccacgacaaatgtgtgcgatcggaggaatgcctgagcgggacatggactcaacagatctgtctgcctgcaatctacaaggttttcccaaatagtgcaccccttgaaggagggacaaggctgaccatatgtggctgggactttggatttcggaggaataataaatttgatttaaagaaaactagagttctccttggaaatgagagctgcaccttgactttaagtgagagcacgatgaatacattgaaatgcacagttggtcctgccatgaataagcatttcaatatgtccataattatttcaaatggccacgggacaacacaatacagtacattctcctatgtggatcctgtaataacaagtatttcgccgaaatacggtcctatggctggtggcactttacttactttaactggaaattacctaaacagtgggaattctagacacatttcaattggtggaaaaacatgtactttaaaaagtgtgtcaaacagtattcttgaatgttataccccagcccaaaccatttcaactgagtttgctgttaaattgaaaattgacttagccaaccgagagacaagcatcttcagttaccgtgaagatcccattgtctatgaaattcatccaaccaaatcttttattagtacttggtggaaagaacctctcaacattgtcagttttctattttgctttgccagtggtgggagcacaataacaggtgttgggaaaaacctgaattcagttagtgtcccgagaatggtcataaatgtgcatgaagcaggaaggaactttacagtggcatgtcaacatcgctctaattcagagataatctgttgtaccactccttccctgcaacagctgaatctgcaactccccctgaaaaccaaagcctttttcatgttagatgggatcctttccaaatactttgatctcatttatgtacataatcctgtgtttaagccttttgaaaagccagtgatgatctcaatgggcaatgaaaatgtactggaaattaagggaaatgatattgaccctgaagcagttaaaggtgaagtgttaaaagttggaaataagagctgtgagaatatacacttacattctgaagccgttttatgcacggtccccaatgacctgctgaaattgaacagcgagctaaatatagagtggaagcaagcaatttcttcaaccgtccttggaaaagtaatagttcaaccagatcagaatttcacaggattgattgctggtgttgtctcaatatcaacagcactgttattactacttgggtttttcctgtggctgaaaaagagaaagcaaattaaagatctgggcagtgaattagttcgctacgatgcaagagtacacactcctcatttggataggcttgtaagtgcccgaagtgtaagcccaactacagaaatggtttcaaatgaatctgtagactaccgagctacttttccagaagatcagtttcctaattcatctcagaacggttcatgccgacaagtgcagtatcctctgacagacatgtcccccatcctaactagtggggactctgatatatccagtccattactgcaaaatactgtccacattgacctcagtgctctaaatccagagctggtccaggcagtgcagcatgtagtgattgggcccagtagcctgattgtgcatttcaatgaagtcataggaagagggcattttggttgtgtatatcatgggactttgttggacaatgatggcaagaaaattcactgtgctgtgaaatccttgaacagaatcactgacataggagaagtttcccaatttctgaccgagggaatcatcatgaaagattttagtcatcccaatgtcctctcgctcctgggaatctgcctgcgaagtgaagggtctccgctggtggtcctaccatacatgaaacatggagatcttcgaaatttcattcgaaatgagactcataatccaactgtaaaagatcttattggctttggtcttcaagtagccaaagcgatgaaatatcttgcaagcaaaaagtttgtccacagagacttggctgcaagaaactgtatgctggatgaaaaattcacagtcaaggttgctgattttggtcttgccagagacatgtatgataaagaatactatagtgtacacaacaaaacaggtgcaaagctgccagtgaagtggatggctttggaaagtctgcaaactcaaaagtttaccaccaagtcagatgtgtggtcctttggcgtcgtcctctgggagctgatgacaagaggagccccaccttatcctgacgtaaacacctttgatataactgtttacttgttgcaagggagaagactcctacaacccgaatactgcccagaccccttatatgaagtaatgctaaaatgctggcaccctaaagccgaaatgcgcccatccttttctgaactggtgtcccggatatcagcgatcttctctactttcattggggagcactatgtccatgtgaacgctacttatgtgaacgtaaaatgtgtcgctccgtatccttctctgttgtcatcagaagataacgctgatgatgaggtggacacacgaccagcctccttctgggagacatcatag

SEQ ID NO: 192 - protein, 1408 aa, Homo sapiens
  Amino acid sequence of HGFR
MKAPAVLAPGILVLLFTLVQRSNGECKEALAKSEMNVNMKYQLPNFTAETPIQNVILHEHHIFLGATNYIYVLNEEDLQKVAEYKTGPVLEHPDCFPCQDCSSKANLSGGVWKDNINMALVVDTYYDDQLISCGSVNRGTCQRHVFPHNHTADIQSEVHCIFSPQIEEPSQCPDCVVSALGAKVLSSVKDRFINFFVGNTINSSYFPDHPLHSISVRRLKETKDGFMFLTDQSYIDVLPEFRDSYPIKYVHAFESNNFIYFLTVQRETLDAQTFHTRIIRFCSINSGLHSYMEMPLECILTEKRKKRSTKKEVFNILQAAYVSKPGAQLARQIGASLNDDILFGVFAQSKPDSAEPMDRSAMCAFPIKYVNDFFNKIVNKNNVRCLQHFYGPNHEHCFNRTLLRNSSGCEARRDEYRTEFTTALQRVDLFMGQFSEVLLTSISTFIKGDLTIANLGTSEGRFMQVVVSRSGPSTPHVNFLLDSHPVSPEVIVEHTLNQNGYTLVITGKKITKIPLNGLGCRHFQSCSQCLSAPPFVQCGWCHDKCVRSEECLSGTWTQQICLPAIYKVFPNSAPLEGGTRLTICGWDFGFRRNNKFDLKKTRVLLGNESCTLTLSESTMNTLKCTVGPAMNKHFNMSIIISNGHGTTQYSTFSYVDPVITSISPKYGPMAGGTLLTLTGNYLNSGNSRHISIGGKTCTLKSVSNSILECYTPAQTISTEFAVKLKIDLANRETSIFSYREDPIVYEIHPTKSFISTWWKEPLNIVSFLFCFASGGSTITGVGKNLNSVSVPRMVINVHEAGRNFTVACQHRSNSEIICCTTPSLQQLNLQLPLKTKAFFMLDGILSKYFDLIYVHNPVFKPFEKPVMISMGNENVLEIKGNDIDPEAVKGEVLKVGNKSCENIHLHSEAVLCTVPNDLLKLNSELNIEWKQAISSTVLGKVIVQPDQNFTGLIAGVVSISTALLLLLGFFLWLKKRKQIKDLGSELVRYDARVHTPHLDRLVSARSVSPTTEMVSNESVDYRATFPEDQFPNSSQNGSCRQVQYPLTDMSPILTSGDSDISSPLLQNTVHIDLSALNPELVQAVQHVVIGPSSLIVHFNEVIGRGHFGCVYHGTLLDNDGKKIHCAVKSLNRITDIGEVSQFLTEGIIMKDFSHPNVLSLLGICLRSEGSPLVVLPYMKHGDLRNFIRNETHNPTVKDLIGFGLQVAKAMKYLASKKFVHRDLAARNCMLDEKFTVKVADFGLARDMYDKEYYSVHNKTGAKLPVKWMALESLQTQKFTTKSDVWSFGVVLWELMTRGAPPYPDVNTFDITVYLLQGRRLLQPEYCPDPLYEVMLKCWHPKAEMRPSFSELVSRISAIFSTFIGEHYVHVNATYVNVKCVAPYPSLLSSEDNADDEVDTRPASFWETS

SEQ ID NO: 193 - DNA, 4203 bp, Homo sapiens
  Coding sequence for RON
atggagctcctcccgccgctgcctcagtccttcctgttgctgctgctgttgcctgccaagcccgcggcgggcgaggactggcagtgcccgcgcaccccctacgcggcctctcgcgactttgacgtgaagtacgtggtgcccagcttctccgccggaggcctggtacaggccatggtgacctacgagggcgacagaaatgagagtgctgtgtttgtagccatacgcaatcgcctgcatgtgcttgggcctgacctgaagtctgtccagagcctggccacgggccctgctggagaccctggctgccagacgtgtgcagcctgtggcccaggaccccacggccctcccggtgacacagacacaaaggtgctggtgctggatcccgcgctgcctgcgctggtcagttgtggctccagcctgcagggccgctgcttcctgcatgacctagagccccaagggacagccgtgcatctggcagcgccagcctgcctcttctcagcccaccataaccggcccgatgactgccccgactgtgtggccagcccattgggcacccgtgtaactgtggttgagcaaggccaggcctcctatttctacgtggcatcctcactggacgcagccgtggctggcagcttcagcccacgctcagtgtctatcaggcgtctcaaggctgacgcctcgggattcgcaccgggctttgtggcgttgtcagtgctgcccaagcatcttgtctcctacagtattgaatacgtgcacagcttccacacgggagccttcgtatacttcctgactgtacagccggccagcgtgacagatgatcctagtgccctgcacacacgcctggcacggcttagcgccactgagccagagttgggtgactatcgggagctggtcctcgactgcagatttgctccaaaacgcaggcgccggggggccccagaaggcggacagccctaccctgtgctgcaggtggcccactccgctccagtgggtgcccaacttgccactgagctgagcatcgccgagggccaggaagtactatttggggtctttgtgactggcaaggatggtggtcctggcgtgggccccaactctgtcgtctgtgccttccccattgacctgctggacacactaattgatgagggtgtggagcgctgttgtgaatccccagtccatccaggcctccggcgaggcctcgacttcttccagtcgcccagtttttgccccaacccgcctggcctggaagccctcagccccaacaccagctgccgccacttccctctgctggtcagtagcagcttctcacgtgtggacctattcaatgggctgttgggaccagtacaggtcactgcattgtatgtgacacgccttgacaacgtcacagtggcacacatgggcacaatggatgggcgtatcctgcaggtggagctggtcaggtcactaaactacttgctgtatgtgtccaacttctcactgggtgacagtgggcagcccgtgcagcgggatgtcagtcgtcttggggaccacctactctttgcctctggggaccaggttttccaggtacctatccgaggccctggctgccgccacttcctgacctgtgggcgttgcctaagggcatggcatttcatgggctgtggctggtgtgggaacatgtgcggccagcagaaggagtgtcctggctcctggcaacaggaccactgcccacctaagcttactgagttccacccccacagtggacctctaaggggcagtacaaggctgaccctgtgtggctccaacttctaccttcacccttctggtctggtgcctgagggaacccatcaggtcactgtgggccaaagtccctgccggccactgcccaaggacagctcaaaactcagaccagtgccccggaaagactttgtagaggagtttgagtgtgaactggagcccttgggcacccaggcagtggggcctaccaacgtcagcctcaccgtgactaacatgccaccgggcaagcacttccgggtagacggcacctccgtgctgagaggcttctctttcatggagccagtgctgatagcagtgcaacccctctttggcccacgggcaggaggcacctgtctcactcttgaaggccagagtctgtctgtaggcaccagccgggctgtgctggtcaatgggactgagtgtctgctagcacgggtcagtgaggggcagcttttatgtgccacaccccctggggccacggtggccagtgtcccccttagcctgcaggtggggggtgcccaggtacctggttcctggaccttccagtacagagaagaccctgtcgtgctaagcatcagccccaactgtggctacatcaactcccacatcaccatctgtggccagcatctaacttcagcatggcacttagtgctgtcattccatgacgggcttagggcagtggaaagcaggtgtgagaggcagcttccagagcagcagctgtgccgccttcctgaatatgtggtccgagacccccagggatgggtggcagggaatctgagtgcccgaggggatggagctgctggctttacactgcctggctttcgcttcctacccccaccccatccacccagtgccaacctagttccactgaagcctgaggagcatgccattaagtttgagtatattgggctgggcgctgtggctgactgtgtgggtatcaacgtgaccgtgggtggtgagagctgccagcacgagttccggggggacatggttgtctgccccctgcccccatccctgcagcttggccaggatggtgccccattgcaggtctgcgtagatggtgaatgtcatatcctgggtagagtggtgcggccagggccagatggggtcccacagagcacgctccttggtatcctgctgcctttgctgctgcttgtggctgcactggcgactgcactggtcttcagctactggtggcggaggaagcagctagttcttcctcccaacctgaatgacctggcatccctggaccagactgctggagccacacccctgcctattctgtactcgggctctgactacagaagtggccttgcactccctgccattgatggtctggattccaccacttgtgtccatggagcatccttctccgatagtgaagatgaatcctgtgtgccactgctgcggaaagagtccatccagctaagggacctggactctgcgctcttggctgaggtcaaggatgtgctgattccccatgagcgggtggtcacccacagtgaccgagtcattggcaaaggccactttggagttgtctaccacggagaatacatagaccaggcccagaatcgaatccaatgtgccatcaagtcactaagtcgcatcacagagatgcagcaggtggaggccttcctgcgagaggggctgctcatgcgtggcctgaaccacccgaatgtgctggctctcattggtatcatgttgccacctgagggcctgccccatgtgctgctgccctatatgtgccacggtgacctgctccagttcatccgctcacctcagcggaaccccaccgtgaaggacctcatcagctttggcctgcaggtagcccgcggcatggagtacctggcagagcagaagtttgtgcacagggacctggctgcgcggaactgcatgctggacgagtcattcacagtcaaggtggctgactttggtttggcccgcgacatcctggacagggagtactatagtgttcaacagcatcgccacgctcgcctacctgtgaagtggatggcgctggagagcctgcagacctatagatttaccaccaagtctgatgtgtggtcatttggtgtgctgctgtgggaactgctgacacggggtgccccaccataccgccacattgacccttttgaccttacccacttcctggcccagggtcggcgcctgccccagcctgagtattgccctgattctctgtaccaagtgatgcagcaatgctgggaggcagacccagcagtgcgacccaccttcagagtactagtgggggaggtggagcagatagtgtctgcactgcttggggaccattatgtgcagctgccagcaacctacatgaacttgggccccagcacctcgcatgagatgaatgtgcgtccagaacagccgcagttctcacccatgccagggaatgtacgccggccccggccactctcagagcctcctcggcccacttga

SEQ ID NO: 194 - protein, 1400 aa, Homo sapiens
  Amino acid sequence of MST1R
MELLPPLPQSFLLLLLLPAKPAAGEDWQCPRTPYAASRDFDVKYVVPSFSAGGLVQAMVTYEGDRNESAVFVAIRNRLHVLGPDLKSVQSLATGPAGDPGCQTCAACGPGPHGPPGDTDTKVLVLDPALPALVSCGSSLQGRCFLHDLEPQGTAVHLAAPACLFSAHHNRPDDCPDCVASPLGTRVTVVEQGQASYFYVASSLDAAVAGSFSPRSVSIRRLKADASGFAPGFVALSVLPKHLVSYSIEYVHSFHTGAFVYFLTVQPASVTDDPSALHTRLARLSATEPELGDYRELVLDCRFAPKRRRRGAPEGGQPYPVLQVAHSAPVGAQLATELSIAEGQEVLFGVFVTGKDGGPGVGPNSVVCAFPIDLLDTLIDEGVERCCESPVHPGLRRGLDFFQSPSFCPNPPGLEALSPNTSCRHFPLLVSSSFSRVDLFNGLLGPVQVTALYVTRLDNVTVAHMGTMDGRILQVELVRSLNYLLYVSNFSLGDSGQPVQRDVSRLGDHLLFASGDQVFQVPIRGPGCRHFLTCGRCLRAWHFMGCGWCGNMCGQQKECPGSWQQDHCPPKLTEFHPHSGPLRGSTRLTLCGSNFYLHPSGLVPEGTHQVTVGQSPCRPLPKDSSKLRPVPRKDFVEEFECELEPLGTQAVGPTNVSLTVTNMPPGKHFRVDGTSVLRGFSFMEPVLIAVQPLFGPRAGGTCLTLEGQSLSVGTSRAVLVNGTECLLARVSEGQLLCATPPGATVASVPLSLQVGGAQVPGSWTFQYREDPVVLSISPNCGYINSHITICGQHLTSAWHLVLSFHDGLRAVESRCERQLPEQQLCRLPEYVVRDPQGWVAGNLSARGDGAAGFTLPGFRFLPPPHPPSANLVPLKPEEHAIKFEYIGLGAVADCVGINVTVGGESCQHEFRGDMVVCPLPPSLQLGQDGAPLQVCVDGECHILGRVVRPGPDGVPQSTLLGILLPLLLLVAALATALVFSYWWRRKQLVLPPNLNDLASLDQTAGATPLPILYSGSDYRSGLALPAIDGLDSTTCVHGASFSDSEDESCVPLLRKESIQLRDLDSALLAEVKDVLIPHERVVTHSDRVIGKGHFGVVYHGEYIDQAQNRIQCAIKSLSRITEMQQVEAFLREGLLMRGLNHPNVLALIGIMLPPEGLPHVLLPYMCHGDLLQFIRSPQRNPTVKDLISFGLQVARGMEYLAEQKFVHRDLAARNCMLDESFTVKVADFGLARDILDREYYSVQQHRHARLPVKWMALESLQTYRFTTKSDVWSFGVLLWELLTRGAPPYRHIDPFDLTHFLAQGRRLPQPEYCPDSLYQVMQQCWEADPAVRPTFRVLVGEVEQIVSALLGDHYVQLPATYMNLGPSTSHEMNVRPEQPQFSPMPGNVRRPRPLSEPPRPT

SEQ ID NO: 195 - DNA, 2742 bp, Homo sapiens
  Coding sequence for DDR1
atgggaccagaggccctgtcatctttactgctgctgctcttggtggcaagtggagatgctgacatgaagggacattttgatcctgccaagtgccgctatgccctgggcatgcaggaccggaccatcccagacagtgacatctctgcttccagctcctggtcagattccactgccgcccgccacagcaggttggagagcagtgacggggatggggcctggtgccccgcagggtcggtgtttcccaaggaggaggagtacttgcaggtggatctacaacgactgcacctggtggctctggtgggcacccagggacggcatgccgggggcctgggcaaggagttctcccggagctaccggctgcgttactcccgggatggtcgccgctggatgggctggaaggaccgctggggtcaggaggtgatctcaggcaatgaggaccctgagggagtggtgctgaaggaccttgggccccccatggttgcccgactggttcgcttctacccccgggctgaccgggtcatgagcgtctgtctgcgggtagagctctatggctgcctctggagggatggactcctgtcttacaccgcccctgtggggcagacaatgtatttatctgaggccgtgtacctcaacgactccacctatgacggacataccgtgggcggactgcagtatgggggtctgggccagctggcagatggtgtggtggggctggatgactttaggaagagtcaggagctgcgggtctggccaggctatgactatgtgggatggagcaaccacagcttctccagtggctatgtggagatggagtttgagtttgaccggctgagggccttccaggctatgcaggtccactgtaacaacatgcacacgctgggagcccgtctgcctggcggggtggaatgtcgcttccggcgtggccctgccatggcctgggagggggagcccatgcgccacaacctagggggcaacctgggggaccccagagcccgggctgtctcagtgccccttggcggccgtgtggctcgctttctgcagtgccgcttcctctttgcggggccctggttactcttcagcgaaatctccttcatctctgatgtggtgaacaattcctctccggcactgggaggcaccttcccgccagccccctggtggccgcctggcccacctcccaccaacttcagcagcttggagctggagcccagaggccagcagcccgtggccaaggccgaggggagcccgaccgccatcctcatcggctgcctggtggccatcatcctgctcctgctgctcatcattgccctcatgctctggcggctgcactggcgcaggctcctcagcaaggctgaacggagggtgttggaagaggagctgacggttcacctctctgtccctggggacactatcctcatcaacaaccgcccaggtcctagagagccacccccgtaccaggagccccggcctcgtgggaatccgccccactccgctccctgtgtccccaatggctctgcgttgctgctctccaatccagcctaccgcctccttctggccacttacgcccgtccccctcgaggcccgggcccccccacacccgcctgggccaaacccaccaacacccaggcctacagtggggactatatggagcctgagaagccaggcgccccgcttctgcccccacctccccagaacagcgtcccccattatgccgaggctgacattgttaccctgcagggcgtcaccgggggcaacacctatgctgtgcctgcactgcccccaggggcagtcggggatgggccccccagagtggatttccctcgatctcgactccgcttcaaggagaagcttggcgagggccagtttggggaggtgcacctgtgtgaggtcgacagccctcaagatctggttagtcttgatttcccccttaatgtgcgtaagggacaccctttgctggtagctgtcaagatcttacggccagatgccaccaagaatgccaggaatgatttcctgaaagaggtgaagatcatgtcgaggctcaaggacccaaacatcattcggctgctgggcgtgtgtgtgcaggacgaccccctctgcatgattactgactacatggagaacggcgacctcaaccagttcctcagtgcccaccagctggaggacaaggcagccgagggggcccctggggacgggcaggctgcgcaggggcccaccatcagctacccaatgctgctgcatgtggcagcccagatcgcctccggcatgcgctatctggccacactcaactttgtacatcgggacctggccacgcggaactgcctagttggggaaaatttcaccatcaaaatcgcagactttggcatgagccggaacctctatgctggggactattaccgtgtgcagggccgggcagtgctgcccatccgctggatggcctgggagtgcatcctcatggggaagttcacgactgcgagtgacgtgtgggcctttggtgtgaccctgtgggaggtgctgatgctctgtagggcccagccctttgggtcagctcaccgacgagcaggtcatcgagaacgcgggggagttcttccgggaccagggccggcagtgtacctgtcccggccgcctgcctgcccgcagggcctatatgagctgatgcttcggtgctggagccgggagtctgagcagcgaccacccttttcccagctgcatcggttcctggcagaggatgcactcaacacggtgtga

SEQ ID NO: 196 - protein, 913 aa, Homo sapiens
  Amino acid sequence of CAK
MGPEALSSLLLLLLVASGDADMKGHFDPAKCRYALGMQDRTIPDSDISASSSWSDSTAARHSRLESSDGDGAWCPAGSVFPKEEEYLQVDLQRLHLVALVGTQGRHAGGLGKEFSRSYRLRYSRDGRRWMGWKDRWGQEVISGNEDPEGVVLKDLGPPMVARLVRFYPRADRVMSVCLRVELYGCLWRDGLLSYTAPVGQTMYLSEAVYLNDSTYDGHTVGGLQYGGLGQLADGVVGLDDFRKSQELRVWPGYDYVGWSNHSFSSGYVEMEFEFDRLRAFQAMQVHCNNMHTLGARLPGGVECRFRRGPAMAWEGEPMRHNLGGNLGDPRARAVSVPLGGRVARFLQCRFLFAGPWLLFSEISFISDVVNNSSPALGGTFPPAPWWPPGPPPTNFSSLELEPRGQQPVAKAEGSPTAILIGCLVAIILLLLLIIALMLWRLHWRRLLSKAERRVLEEELTVHLSVPGDTILINNRPGPREPPPYQEPRPRGNPPHSAPCVPNGSALLLSNPAYRLLLATYARPPRGPGPPTPAWAKPTNTQAYSGDYMEPEKPGAPLLPPPPQNSVPHYAEADIVTLQGVTGGNTYAVPALPPGAVGDGPPRVDFPRSRLRFKEKLGEGQFGEVHLCEVDSPQDLVSLDFPLNVRKGHPLLVAVKILRPDATKNARNDFLKEVKIMSRLKDPNIIRLLGVCVQDDPLCMITDYMENGDLNQFLSAHQLEDKAAEGAPGDGQAAQGPTISYPMLLHVAAQIASGMRYLATLNFVHRDLATRNCLVGENFTIKIADFGMSRNLYAGDYYRVQGRAVLPIRWMAWECILMGKFTTASDVWAFGVTLWEVLMLCRAQPFGSAHRRAGHRERGGVLPGPGPAVYLSRPPACPQGLYELMLRCWSRESEQRPPFSQLHRFLAEDALNTV

SEQ ID NO: 197 - DNA, 2568 bp, Homo sapiens
  Coding sequence for DDR2
atgatcctgattcccagaatgctcttggtgctgttcctgctgctgcctatcttgagttctgcaaaagctcaggttaatccagctatatgccgctatcctctgggcatgtcaggaggccagattccagatgaggacatcacagcttccagtcagtggtcagagtccacagctgccaaatatggaaggctggactcagaagaaggggatggagcctggtgccctgagattccagtggaacctgatgacctgaaggagtttctgcagattgacttgcacaccctccattttatcactctggtggggacccaggggcgccatgcaggaggtcatggcatcgagtttgcccccatgtacaagatcaattacagtcgggatggcactcgctggatctcttggcggaaccgtcatgggaaacaggtgctggatggaaatagtaacccctatgacattttcctaaaggacttggagccgcccattgtagccagatttgtccggttcattccagtcaccgaccactccatgaatgtgtgtatgagagtggagctttacggctgtgtctggctagatggcttggtgtcttacaatgctccagctgggcagcagtttgtactccctggaggttccatcatttatctgaatgattctgtctatgatggagctgttggatacagcatgacagaagggctaggccaattgaccgatggtgtgtctggcctggacgatttcacccagacccatgaataccacgtgtggcccggctatgactatgtgggctggcggaacgagagtgccaccaatggctacattgagatcatgtttgaatttgaccgcatcaggaatttcactaccatgaaggtccactgcaacaacatgtttgctaaaggtgtgaagatctttaaggaggtacagtgctacttccgctctgaagccagtgagtgggaacctaatgccatttccttcccccttgtcctggatgacgtcaaccccagtgctcggtttgtcacggtgcctctccaccaccgaatggccagtgccatcaagtgtcaataccattttgcagatacctggatgatgttcagtgagatcaccttccaatcagatgctgcaatgtacaacaactctgaagccctgcccacctctcctatggcacccacaacctatgatccaatgcttaaagttgatgacagcaacactcggatcctgattggctgcttggtggccatcatctttatcctcctggccatcattgtcatcatcctctggaggcagttctggcagaaaatgctggagaaggcttctcggaggatgctggatgatgaaatgacagtcagcctttccctgccaagtgattctagcatgttcaacaataaccgctcctcatcacctagtgaacaagggtccaactcgacttacgatcgcatctttccccttcgccctgactaccaggagccatccaggctgatacgaaaactcccagaatttgctccaggggaggaggagtcaggctgcagcggtgttgtgaagccagtccagcccagtggccctgagggggtgccccactatgcagaggctgacatagtgaacctccaaggagtgacaggaggcaacacatactcagtgcctgccgtcaccatggacctgctctcaggaaaagatgtggctgtggaggagttccccaggaaactcctaactttcaaagagaagctgggagaaggacagtttggggaggttcatctctgtgaagtggagggaatggaaaaattcaaagacaaagattttgccctagatgtcagtgccaaccagcctgtcctggtggctgtgaaaatgctccgagcagatgccaacaagaatgccaggaatgattttcttaaggagataaagatcatgtctcggctcaaggacccaaacatcatccatctattatctgtgtgtatcactgatgaccctctctgtatgatcactgaatacatggagaatggagatctcaatcagtttctttcccgccacgagccccctaattcttcctccagcgatgtacgcactgtcagttacaccaatctgaagtttatggctacccaaattgcctctggcatgaagtacctttcctctcttaattttgttcaccgagatctggccacacgaaactgtttagtgggtaagaactacacaatcaagatagctgactttggaatgagcaggaacctgtacagtggtgactattaccggatccagggccgggcagtgctccctatccgctggatgtcttgggagagtatcttgctgggcaagttcactacagcaagtgatgtgtgggcctttggggttactttgtgggagactttcaccttttgtcaagaacagccctattcccagctgtcagatgaacaggttattgagaatactggagagttcttccgagaccaagggaggcagacttacctccctcaaccagccatttgtcctgactctgtgtataagctgatgctcagctgctggagaagagatacgaagaaccgtccctcattccaagaaatccaccttctgctccttcaacaaggcgacgagtga

SEQ ID NO: 198 - protein, 855 aa, Homo sapiens
  Amino acid sequence of TKT
MILIPRMLLVLFLLLPILSSAKAQVNPAICRYPLGMSGGQIPDEDITASSQWSESTAAKYGRLDSEEGDGAWCPEIPVEPDDLKEFLQIDLHTLHFITLVGTQGRHAGGHGIEFAPMYKINYSRDGTRWISWRNRHGKQVLDGNSNPYDIFLKDLEPPIVARFVRFIPVTDHSMNVCMRVELYGCVWLDGLVSYNAPAGQQFVLPGGSIIYLNDSVYDGAVGYSMTEGLGQLTDGVSGLDDFTQTHEYHVWPGYDYVGWRNESATNGYIEIMFEFDRIRNFTTMKVHCNNMFAKGVKIFKEVQCYFRSEASEWEPNAISFPLVLDDVNPSARFVTVPLHHRMASAIKCQYHFADTWMMFSEITFQSDAAMYNNSEALPTSPMAPTTYDPMLKVDDSNTRILIGCLVAIIFILLAIIVIILWRQFWQKMLEKASRRMLDDEMTVSLSLPSDSSMFNNNRSSSPSEQGSNSTYDRIFPLRPDYQEPSRLIRKLPEFAPGEEESGCSGVVKPVQPSGPEGVPHYAEADIVNLQGVTGGNTYSVPAVTMDLLSGKDVAVEEFPRKLLTFKEKLGEGQFGEVHLCEVEGMEKFKDKDFALDVSANQPVLVAVKMLRADANKNARNDFLKEIKIMSRLKDPNIIHLLSVCITDDPLCMITEYMENGDLNQFLSRHEPPNSSSSDVRTVSYTNLKFMATQIASGMKYLSSLNFVHRDLATRNCLVGKNYTIKIADFGMSRNLYSGDYYRIQGRAVLPIRWMSWESILLGKFTTASDVWAFGVTLWETFTFCQEQPYSQLSDEQVIENTGEFFRDQGRQTYLPQPAICPDSVYKLMLSCWRRDTKNRPSFQEIHLLLLQQGDE

SEQ ID NO: 199 - DNA, 2583 bp, Homo sapiens
  Coding sequence for RET
atggtgcccttcccggtgaccgtgtacgacgaggacgactcggcgcccaccttccccgcgggcgtcgacaccgccagcgccgtggtggagttcaagcggaaggaggacaccgtggtggccacgctgcgtgtcttcgatgcagacgtggtacctgcatcaggggagctggtgaggcggtacacaagcacgctgctccccggggacacctgggcccagcagaccttccgggtggaacactggcccaacgagacctcggtccaggccaacggcagcttcgtgcgggcgaccgtacatgactataggctggttctcaaccggaacctctccatctcggagaaccgcaccatgcagctggcggtgctggtcaatgactcagacttccagggcccaggagcgggcgtcctcttgctccacttcaacgtgtcggtgctgccggtcagcctgcacctgcccagtacctactccctctccgtgagcaggagggctcgccgatttgcccagatcgggaaagtctgtgtggaaaactgccaggcgttcagtggcatcaacgtccagtacaagctgcattcctctggtgccaactgcagcacgctaggggtggtcacctcagccgaggacacctcggggatcctgtttgtgaatgacaccaaggccctgcggcggcccaagtgtgccgaacttcactacatggtggtggccaccgaccagcagacctctaggcaggcccaggcccagctgcttgtaacagtggaggggtcatatgtggccgaggaggcgggctgccccctgtcctgtgcagtcagcaagagacggctggagtgtgaggagtgtggcggcctgggctccccaacaggcaggtgtgagtggaggcaaggagatggcaaagggatcaccaggaacttctccacctgctctcccagcaccaagacctgccccgacggccactgcgatgttgtggagacccaagacatcaacatttgccctcaggactgcctccggggcagcattgttgggggacacgagcctggggagccccgggggattaaagctggctatggcacctgcaactgcttccctgaggaggagaagtgcttctgcgagcccgaagacatccaggatccactgtgcgacgagctgtgccgcacggtgatcgcagccgctgtcctcttctccttcatcgtctcggtgctgctgtctgccttctgcatccactgctaccacaagtttgcccacaagccacccatctcctcagctgagatgaccttccggaggcccgcccaggccttcccggtcagctactcctcttccggtgcccgccggccctcgctggactccatggagaaccaggtctccgtggatgccttcaagatcctggaggatccaaagtgggaattccctcggaagaacttggttcttggaaaaactctaggagaaggcgaatttggaaaagtggtcaaggcaacggccttccatctgaaaggcagagcagggtacaccacggtggccgtgaagatgctgaaagagaacgcctccccgagtgagcttcgagacctgctgtcagagttcaacgtcctgaagcaggtcaaccacccacatgtcatcaaattgtatggggcctgcagccaggatggcccgctcctcctcatcgtggagtacgccaaatacggctccctgcggggcttcctccgcgagagccgcaaagtggggcctggctacctgggcagtggaggcagccgcaactccagctccctggaccacccggatgagcgggccctcaccatgggcgacctcatctcatttgcctggcagatctcacaggggatgcagtatctggccgagatgaagctcgttcatcgggacttggcagccagaaacatcctggtagctgaggggcggaagatgaagatttcggatttcggcttgtcccgagatgtttatgaagaggattcctacgtgaagaggagccagggtcggattccagttaaatggatggcaattgaatccctttttgatcatatctacaccacgcaaagtgatgtatggtcttttggtgtcctgctgtgggagatcgtgaccctagggggaaacccctatcctgggattcctcctgagcggctcttcaaccttctgaagaccggccaccggatggagaggccagacaactgcagcgaggagatgtaccgcctgatgctgcaatgctggaagcaggagccggacaaaaggccggtgtttgcggacatcagcaaagacctggagaagatgatggttaagaggagagactacttggaccttgcggcgtccactccatctgactccctgatttatgacgacggcctctcagaggaggagacaccgctggtggactgtaataatgcccccctccctcgagccctcccttccacatggattgaaaacaaactctatggcatgtcagacccgaactggcctggagagagtcctgtaccactcacgagagctgatggcactaacactgggtttccaagatatccaaatgatagtgtatatgctaactggatgctttcaccctcagcggcaaaattaatggacacgtttgatagttaa

SEQ ID NO: 200 - protein, 860 aa, Homo sapiens
  Amino acid sequence of MEN2A/B
MVPFPVTVYDEDDSAPTFPAGVDTASAVVEFKRKEDTVVATLRVFDADVVPASGELVRRYTSTLLPGDTWAQQTFRVEHWPNETSVQANGSFVRATVHDYRLVLNRNLSISENRTMQLAVLVNDSDFQGPGAGVLLLHFNVSVLPVSLHLPSTYSLSVSRRARRFAQIGKVCVENCQAFSGINVQYKLHSSGANCSTLGVVTSAEDTSGILFVNDTKALRRPKCAELHYMVVATDQQTSRQAQAQLLVTVEGSYVAEEAGCPLSCAVSKRRLECEECGGLGSPTGRCEWRQGDGKGITRNFSTCSPSTKTCPDGHCDVVETQDINICPQDCLRGSIVGGHEPGEPRGIKAGYGTCNCFPEEEKCFCEPEDIQDPLCDELCRTVIAAAVLFSFIVSVLLSAFCIHCYHKFAHKPPISSAEMTFRRPAQAFPVSYSSSGARRPSLDSMENQVSVDAFKILEDPKWEFPRKNLVLGKTLGEGEFGKVVKATAFHLKGRAGYTTVAVKMLKENASPSELRDLLSEFNVLKQVNHPHVIKLYGACSQDGPLLLIVEYAKYGSLRGFLRESRKVGPGYLGSGGSRNSSSLDHPDERALTMGDLISFAWQISQGMQYLAEMKLVHRDLAARNILVAEGRKMKISDFGLSRDVYEEDSYVKRSQGRIPVKWMAIESLFDHIYTTQSDVWSFGVLLWEIVTLGGNPYPGIPPERLFNLLKTGHRMERPDNCSEEMYRLMLQCWKQEPDKRPVFADISKDLEKMMVKRRDYLDLAASTPSDSLIYDDGLSEEETPLVDCNNAPLPRALPSTWIENKLYGMSDPNWPGESPVPLTRADGTNTGFPRYPNDSVYANWMLSPSAAKLMDTFDS

SEQ ID NO: 201 - DNA, 7044 bp, Homo sapiens
  Coding sequence for ROS1
atgaagaacatttactgtcttattccgaagcttgtcaattttgcaactcttggctgcctatggatttctgtggtgcagtgtacagttttaaatagctgcctaaagtcgtgtgtaactaatctgggccagcagcttgaccttggcacaccacataatctgagtgaaccgtgtatccaaggatgtcacttttggaactctgtagatcagaaaaactgtgctttaaagtgtcgggagtcgtgtgaggttggctgtagcagcgcggaaggtgcatatgaagaggaagtactggaaaatgcagacctaccaactgctccctttgcttcttccattggaagccacaatatgacattacgatggaaatctgcaaacttctctggagtaaaatacatcattcagtggaaatatgcacaacttctgggaagctggacttatactaagactgtgtccagaccgtcctatgtggtcaagcccctgcaccccttcactgagtacattttccgagtggtttggatcttcacagcgcagctgcagctctactcccctccaagtcccagttacaggactcatcctcatggagttcctgaaactgcacctttgattaggaatattgagagctcaagtcccgacactgtggaagtcagctgggatccacctcaattcccaggtggacctattttgggttataacttaaggctgatcagcaaaaatcaaaaattagatgcagggacacagagaaccagtttccagttttactccactttaccaaatactatctacaggttttctattgcagcagtaaatgaagttggtgagggtccagaagcagaatctagtattaccacttcatcttcagcagttcaacaagaggaacagtggctctttttatccagaaaaacttctctaagaaagagatctttaaaacatttagtagatgaagcacattgccttcggttggatgctatataccataatattacaggaatatctgttgatgtccaccagcaaattgtttatttctctgaaggaactctcatatgggcgaagaaggctgccaacatgtctgatgtatctgacctgagaattttttacagaggttcaggattaatttcttctatctccatagattggctttatcaaagaatgtatttcatcatggatgaactggtatgtgtctgtgatttagagaactgctcaaacatcgaggaaattactccaccctctattagtgcacctcaaaaaattgtggctgattcatacaatgggtatgtcttttacctcctgagagatggcatttatagagcagaccttcctgtaccatctggccggtgtgcagaagctgtgcgtattgtggagagttgcacgttaaaggactttgcaatcaagccacaagccaagcgaatcatttacttcaatgacactgcccaagtcttcatgtcaacatttctggatggctctgcttcccatctcatcctacctcgcatcccctttgctgatgtgaaaagttttgcttgtgaaaacaatgactttcttgtcacagatggcaaggtcattttccaacaggatgctttgtcttttaatgaattcatcgtgggatgtgacctgagtcacatagaagaatttgggtttggtaacttggtcatctttggctcatcctcccagctgcaccctctgccaggccgcccgcaggagctttcggtgctgtttggctctcaccaggctcttgttcaatggaagcctcctgcccttgccataggagccaatgtcatcctgatcagtgatattattgaactctttgaattaggcccttctgcctggcagaactggacctatgaggtgaaagtatccacccaagaccctcctgaagtcactcatattttcttgaacataagtggaaccatgctgaatgtacctgagctgcagagtgctatgaaatacaaggtttctgtgagagcaagttctccaaagaggccaggcccctggtcagagccctcagtgggtactaccctggtgccagctagtgaaccaccatttatcatggctgtgaaagaagatgggctttggagtaaaccattaaatagctttggcccaggagagttcttatcctctgatataggaaatgtgtcagacatggattggtataacaacagcctctactacagtgacacgaaaggcgacgtttttgtgtggctgctgaatgggacggatatctcagagaattatcacctacccagcattgcaggagcaggggctttagcttttgagtggctgggtcactttctctactgggctggaaagacatatgtgatacaaaggcagtctgtgttgacgggacacacagacattgttacccacgtgaagctattggtgaatgacatggtggtggattcagttggtggatatctctactggaccacactctattcagtggaaagcaccagactaaatggggaaagttcccttgtactacagacacagccttggttttctgggaaaaaggtaattgctctaactttagacctcagtgatgggctcctgtattggttggttcaagacagtcaatgtattcacctgtacacagctgttcttcggggacagagcactggggataccaccatcacagaatttgcagcctggagtacttctgaaatttcccagaatgcactgatgtactatagtggtcggctgttctggatcaatggctttaggattatcacaactcaagaaataggtcagaaaaccagtgtctctgttttggaaccagccagatttaatcagttcacaattattcagacatcccttaagcccctgccagggaacttttcctttacccctaaggttattccagattctgttcaagagtcttcatttaggattgaaggaaatgcttcaagttttcaaatcctgtggaatggtccccctgcggtagactggggtgtagttttctacagtgtagaatttagtgctcattctaagttcttggctagtgaacaacactctttacctgtatttactgtggaaggactggaaccttatgccttatttaatctttctgtcactccttatacctactggggaaagggccccaaaacatctctgtcacttcgagcacctgaaacagttccatcagcaccagagaaccccagaatatttatattaccaagtggaaaatgctgcaacaagaatgaagttgtggtggaatttaggtggaacaaacctaagcatgaaaatggggtgttaacaaaatttgaaattttctacaatatatccaatcaaagtattacaaacaaaacatgtgaagactggattgctgtcaatgtcactccctcagtgatgtcttttcaacttgaaggcatgagtcccagatgctttattgccttccaggttagggcctttacatctaaggggccaggaccatatgctgacgttgtaaagtctacaacatcagaaatcaacccatttcctcacctcataactcttcttggtaacaagatagtttttttagatatggatcaaaatcaagttgtgtggacgttttcagcagaaagagttatcagtgccgtttgctacacagctgataatgagatgggatattatgctgaaggggactcactctttcttctgcacttgcacaatcgctctagctctgagcttttccaagattcactggtttttgatatcacagttattacaattgactggatttcaaggcacctctactttgcactgaaagaatcacaaaatggaatgcaagtatttgatgttgatcttgaacacaaggtgaaatatcccagagaggtgaagattcacaataggaattcaacaataatttctttttctgtatatcctcttttaagtcgcttgtattggacagaagtttccaattttggctaccagatgttctactacagtattatcagtcacaccttgcaccgaattctgcaacccacagctacaaaccaacaaaacaaaaggaatcaatgttcttgtaatgtgactgaatttgagttaagtggagcaatggctattgatacctctaacctagagaaaccattgatatactttgccaaagcacaagagatctgggcaatggatctggaaggctgtcagtgttggagagttatcacagtacctgctatgctcgcaggaaaaacccttgttagcttaactgtggatggagatcttatatactggatcatcacagcaaaggacagcacacagatttatcaggcaaagaaaggaaatggggccatcgtttcccaggtgaaggccctaaggagtaggcatatcttggcttacagttcagttatgcagccttttccagataaagcgtttctgtctctagcttcagacactgtggaaccaactatacttaatgccactaacactagcctcacaatcagattacctctggccaagacaaacctcacatggtatggcatcaccagccctactccaacatacctggtttattatgcagaagttaatgacaggaaaaacagctctgacttgaaatatagaattctggaatttcaggacagtatagctcttattgaagatttacaaccattttcaacatacatgatacagatagctgtaaaaaattattattcagatcctttggaacatttaccaccaggaaaagagatttggggaaaaactaaaaatggagtaccagaggcagtgcagctcattaatacaactgtgcggtcagacaccagcctcattatatcttggagagaatctcacaagccaaatggacctaaagaatcagtccgttatcagttggcaatctcacacctggccctaattcctgaaactcctctaagacaaagtgaatttccaaatggaaggctcactctccttgttactagactgtctggtggaaatatttatgtgttaaaggttcttgcctgccactctgaggaaatgtggtgtacagagagtcatcctgtcactgtggaaatgtttaacacaccagagaaaccttattccttggttccagagaacactagtttgcaatttaattggaaggctccattgaatgttaacctcatcagattttgggttgagctacagaagtggaaatacaatgagttttaccatgttaaaacttcatgcagccaaggtcctgcttatgtctgtaatatcacaaatctacaaccttatacttcatataatgtcagagtagtggtggtttataagacgggagaaaatagcacctcacttccagaaagctttaagacaaaagctggagtcccaaataaaccaggcattcccaaattactagaagggagtaaaaattcaatacagtgggagaaagctgaagataatggatgtagaattacatactatatccttgagataagaaagagcacttcaaataatttacagaaccagaatttaaggtggaagatgacatttaatggatcctgcagtagtgtttgcacatggaagtccaaaaacctgaaaggaatatttcagttcagagtagtagctgcaaataatctagggtttggtgaatatagtggaatcagtgagaatattatattagttggagatgatttttggataccagaaacaagtttcatacttactattatagttggaatatttctggttgttacaatcccactgacctttgtctggcatagaagattaaagaatcaaaaaagtgccaaggaaggggtgacagtgcttataaacgaagacaaagagttggctgagctgcgaggtctggcagccggagtaggcctggctaatgcctgctatgcaatacatactcttccaacccaagaggagattgaaaatcttcctgccttccctcgggaaaaactgactctgcgtctcttgctgggaagtggagcctttggagaagtgtatgaaggaacagcagtggacatcttaggagttggaagtggagaaatcaaagtagcagtgaagactttgaagaagggttccacagaccaggagaagattgaattcctgaaggaggcacatctgatgagcaaatttaatcatcccaacattctgaagcagcttggagtttgtctgctgaatgaaccccaatacattatcctggaactgatggagggaggagaccttcttacttatttgcgtaaagcccggatggcaacgttttatggtcctttactcaccttggttgaccttgtagacctgtgtgtagatatttcaaaaggctgtgtctacttggaacggatgcatttcattcacagggatctggcagctagaaattgccttgtttccgtgaaagactataccagtccacggatagtgaagattggagactttggactcgccagagacatctataaaaatgattactatagaaagagaggggaaggcctgctcccagttcggtggatggctccagaaagtttgatggatggaatcttcactactcaatctgatgtatggtcttttggaattctgatttgggagattttaactcttggtcatcagccttatccagctcattccaaccttgatgtgttaaactatgtgcaaacaggagggagactggagccaccaagaaattgtcctgatgatctgtggaatttaatgacccagtgctgggctcaagaacccgaccaaagacctacttttcatagaattcaggaccaacttcagttattcagaaattttttcttaaatagcatttataagtccagagatgaagcaaacaacagtggagtcataaatgaaagctttgaaggtgaagatggcgatgtgatttgtttgaattcagatgacattatgccagttgctttaatggaaacgaagaaccgagaagggttaaactatatggtacttgctacagaatgtggccaaggtgaagaaaagtctgagggtcctctaggctcccaggaatctgaatcttgtggtctgaggaaagaagagaaggaaccacatgcagacaaagatttctgccaagaaaaacaagtggcttactgcccttctggcaagcctgaaggcctgaactatgcctgtctcactcacagtggatatggagatgggtctgattaa

SEQ ID NO: 202 - protein, 2347 aa, Homo sapiens
  Amino acid sequence of MCF3
MKNIYCLIPKLVNFATLGCLWISVVQCTVLNSCLKSCVTNLGQQLDLGTPHNLSEPCIQGCHFWNSVDQKNCALKCRESCEVGCSSAEGAYEEEVLENADLPTAPFASSIGSHNMTLRWKSANFSGVKYIIQWKYAQLLGSWTYTKTVSRPSYVVKPLHPFTEYIFRVVWIFTAQLQLYSPPSPSYRTHPHGVPETAPLIRNIESSSPDTVEVSWDPPQFPGGPILGYNLRLISKNQKLDAGTQRTSFQFYSTLPNTIYRFSIAAVNEVGEGPEAESSITTSSSAVQQEEQWLFLSRKTSLRKRSLKHLVDEAHCLRLDAIYHNITGISVDVHQQIVYFSEGTLIWAKKAANMSDVSDLRIFYRGSGLISSISIDWLYQRMYFIMDELVCVCDLENCSNIEEITPPSISAPQKIVADSYNGYVFYLLRDGIYRADLPVPSGRCAEAVRIVESCTLKDFAIKPQAKRIIYFNDTAQVFMSTFLDGSASHLILPRIPFADVKSFACENNDFLVTDGKVIFQQDALSFNEFIVGCDLSHIEEFGFGNLVIFGSSSQLHPLPGRPQELSVLFGSHQALVQWKPPALAIGANVILISDIIELFELGPSAWQNWTYEVKVSTQDPPEVTHIFLNISGTMLNVPELQSAMKYKVSVRASSPKRPGPWSEPSVGTTLVPASEPPFIMAVKEDGLWSKPLNSFGPGEFLSSDIGNVSDMDWYNNSLYYSDTKGDVFVWLLNGTDISENYHLPSIAGAGALAFEWLGHFLYWAGKTYVIQRQSVLTGHTDIVTHVKLLVNDMVVDSVGGYLYWTTLYSVESTRLNGESSLVLQTQPWFSGKKVIALTLDLSDGLLYWLVQDSQCIHLYTAVLRGQSTGDTTITEFAAWSTSEISQNALMYYSGRLFWINGFRIITTQEIGQKTSVSVLEPARFNQFTIIQTSLKPLPGNFSFTPKVIPDSVQESSFRIEGNASSFQILWNGPPAVDWGVVFYSVEFSAHSKFLASEQHSLPVFTVEGLEPYALFNLSVTPYTYWGKGPKTSLSLRAPETVPSAPENPRIFILPSGKCCNKNEVVVEFRWNKPKHENGVLTKFEIFYNISNQSITNKTCEDWIAVNVTPSVMSFQLEGMSPRCFIAFQVRAFTSKGPGPYADVVKSTTSEINPFPHLITLLGNKIVFLDMDQNQVVWTFSAERVISAVCYTADNEMGYYAEGDSLFLLHLHNRSSSELFQDSLVFDITVITIDWISRHLYFALKESQNGMQVFDVDLEHKVKYPREVKIHNRNSTIISFSVYPLLSRLYWTEVSNFGYQMFYYSIISHTLHRILQPTATNQQNKRNQCSCNVTEFELSGAMAIDTSNLEKPLIYFAKAQEIWAMDLEGCQCWRVITVPAMLAGKTLVSLTVDGDLIYWIITAKDSTQIYQAKKGNGAIVSQVKALRSRHILAYSSVMQPFPDKAFLSLASDTVEPTILNATNTSLTIRLPLAKTNLTWYGITSPTPTYLVYYAEVNDRKNSSDLKYRILEFQDSIALIEDLQPFSTYMIQIAVKNYYSDPLEHLPPGKEIWGKTKNGVPEAVQLINTTVRSDTSLIISWRESHKPNGPKESVRYQLAISHLALIPETPLRQSEFPNGRLTLLVTRLSGGNIYVLKVLACHSEEMWCTESHPVTVEMFNTPEKPYSLVPENTSLQFNWKAPLNVNLIRFWVELQKWKYNEFYHVKTSCSQGPAYVCNITNLQPYTSYNVRVVVVYKTGENSTSLPESFKTKAGVPNKPGIPKLLEGSKNSIQWEKAEDNGCRITYYILEIRKSTSNNLQNQNLRWKMTFNGSCSSVCTWKSKNLKGIFQFRVVAANNLGFGEYSGISENIILVGDDFWIPETSFILTIIVGIFLVVTIPLTFVWHRRLKNQKSAKEGVTVLINEDKELAELRGLAAGVGLANACYAIHTLPTQEEIENLPAFPREKLTLRLLLGSGAFGEVYEGTAVDILGVGSGEIKVAVKTLKKGSTDQEKIEFLKEAHLMSKFNHPNILKQLGVCLLNEPQYIILELMEGGDLLTYLRKARMATFYGPLLTLVDLVDLCVDISKGCVYLERMHFIHRDLAARNCLVSVKDYTSPRIVKIGDFGLARDIYKNDYYRKRGEGLLPVRWMAPESLMDGIFTTQSDVWSFGILIWEILTLGHQPYPAHSNLDVLNYVQTGGRLEPPRNCPDDLWNLMTQCWAQEPDQRPTFHRIQDQLQLFRNFFLNSIYKSRDEANNSGVINESFEGEDGDVICLNSDDIMPVALMETKNREGLNYMVLATECGQGEEKSEGPLGSQESESCGLRKEEKEPHADKDFCQEKQVAYCPSGKPEGLNYACLTHSGYGDGSD

SEQ ID NO: 203 - DNA, 4863 bp, Homo sapiens
  Coding sequence for ALK
atgggagccatcgggctcctgtggctcctgccgctgctgctttccacggcagctgtgggctccgggatggggaccggccagcgcgcgggctccccagctgcggggccgccgctgcagccccgggagccactcagctactcgcgcctgcagaggaagagtctggcagttgacttcgtggtgccctcgctcttccgtgtctacgcccgggacctactgctgccaccatcctcctcggagctgaaggctggcaggcccgaggcccgcggctcgctagctctggactgcgccccgctgctcaggttgctggggccggcgccgggggtctcctggaccgccggttcaccagccccggcagaggcccggacgctgtccagggtgctgaagggcggctccgtgcgcaagctccggcgtgccaagcagttggtgctggagctgggcgaggaggcgatcttggagggttgcgtcgggccccccggggaggcggctgtggggctgctccagttcaatctcagcgagctgttcagttggtggattcgccaaggcgaagggcgactgaggatccgcctgatgcccgagaagaaggcgtcggaagtgggcagagagggaaggctgtccgcggcaattcgcgcctcccagccccgccttctcttccagatcttcgggactggtcatagctccttggaatcaccaacaaacatgccttctccttctcctgattattttacatggaatctcacctggataatgaaagactccttccctttcctgtctcatcgcagccgatatggtctggagtgcagctttgacttcccctgtgagctggagtattcccctccactgcatgacctcaggaaccagagctggtcctggcgccgcatcccctccgaggaggcctcccagatggacttgctggatgggcctggggcagagcgttctaaggagatgcccagaggctcctttctccttctcaacacctcagctgactccaagcacaccatcctgagtccgtggatgaggagcagcagtgagcactgcacactggccgtctcggtgcacaggcacctgcagccctctggaaggtacattgcccagctgctgccccacaacgaggctgcaagagagatcctcctgatgcccactccagggaagcatggttggacagtgctccagggaagaatcgggcgtccagacaacccatttcgagtggccctggaatacatctccagtggaaaccgcagcttgtctgcagtggacttctttgccctgaagaactgcagtgaaggaacatccccaggctccaagatggccctgcagagctccttcacttgttggaatgggacagtcctccagcttgggcaggcctgtgacttccaccaggactgtgcccagggagaagatgagagccagatgtgccggaaactgcctgtgggtttttactgcaactttgaagatggcttctgtggctggacccaaggcacactgtcaccccacactcctcaatggcaggtcaggaccctaaaggatgcccggttccaggaccaccaagaccatgctctattgctcagtaccactgatgtccccgcttctgaaagtgctacagtgaccagtgctacgtttcctgcaccgatcaagagctctccatgtgagctccgaatgtcctggctcattcgtggagtcttgaggggaaacgtgtccttggtgctagtggagaacaaaaccgggaaggagcaaggcaggatggtctggcatgtcgccgcctatgaaggcttgagcctgtggcagtggatggtgttgcctctcctcgatgtgtctgacaggttctggctgcagatggtcgcatggtggggacaaggatccagagccatcgtggcttttgacaatatctccatcagcctggactgctacctcaccattagcggagaggacaagatcctgcagaatacagcacccaaatcaagaaacctgtttgagagaaacccaaacaaggagctgaaacccggggaaaattcaccaagacagacccccatctttgaccctacagttcattggctgttcaccacatgtggggccagcgggccccatggccccacccaggcacagtgcaacaacgcctaccagaactccaacctgagcgtggaggtggggagcgagggccccctgaaaggcatccagatctggaaggtgccagccaccgacacctacagcatctcgggctacggagctgctggcgggaaaggcgggaagaacaccatgatgcggtcccacggcgtgtctgtgctgggcatcttcaacctggagaaggatgacatgctgtacatcctggttgggcagcagggagaggacgcctgccccagtacaaaccagttaatccagaaagtctgcattggagagaacaatgtgatagaagaagaaatccgtgtgaacagaagcgtgcatgagtgggcaggaggcggaggaggagggggtggagccacctacgtatttaagatgaaggatggagtgccggtgcccctgatcattgcagccggaggtggtggcagggcctacggggccaagacagacacgttccacccagagagactggagaataactcctcggttctagggctaaacggcaattccggagccgcaggtggtggaggtggctggaatgataacacttccttgctctgggccggaaaatctttgcaggagggtgccaccggaggacattcctgcccccaggccatgaagaagtgggggtgggagacaagagggggtttcggagggggtggaggggggtgctcctcaggtggaggaggcggaggatatataggcggcaatgcagcctcaaacaatgaccccgaaatggatggggaagatggggtttccttcatcagtccactgggcatcctgtacaccccagctttaaaagtgatggaaggccacggggaagtgaatattaagcattatctaaactgcagtcactgtgaggtagacgaatgtcacatggaccctgaaagccacaaggtcatctgcttctgtgaccacgggacggtgctggctgaggatggcgtctcctgcattgtgtcacccaccccggagccacacctgccactctcgctgatcctctctgtggtgacctctgccctcgtggccgccctggtcctggctttctccggcatcatgattgtgtaccgccggaagcaccaggagctgcaagccatgcagatggagctgcagagccctgagtacaagctgagcaagctccgcacctcgaccatcatgaccgactacaaccccaactactgctttgctggcaagacctcctccatcagtgacctgaaggaggtgccgcggaaaaacatcaccctcattcggggtctgggccatggcgcctttggggaggtgtatgaaggccaggtgtccggaatgcccaacgacccaagccccctgcaagtggctgtgaagacgctgcctgaagtgtgctctgaacaggacgaactggatttcctcatggaagccctgatcatcagcaaattcaaccaccagaacattgttcgctgcattggggtgagcctgcaatccctgccccggttcatcctgctggagctcatggcggggggagacctcaagtccttcctccgagagacccgccctcgcccgagccagccctcctccctggccatgctggaccttctgcacgtggctcgggacattgcctgtggctgtcagtatttggaggaaaaccacttcatccaccgagacattgctgccagaaactgcctcttgacctgtccaggccctggaagagtggccaagattggagacttcgggatggcccgagacatctacagggcgagctactatagaaagggaggctgtgccatgctgccagttaagtggatgcccccagaggccttcatggaaggaatattcacttctaaaacagacacatggtcctttggagtgctgctatgggaaatcttttctcttggatatatgccataccccagcaaaagcaaccaggaagttctggagtttgtcaccagtggaggccggatggacccacccaagaactgccctgggcctgtataccggataatgactcagtgctggcaacatcagcctgaagacaggcccaactttgccatcattttggagaggattgaatactgcacccaggacccggatgtaatcaacaccgctttgccgatagaatatggtccacttgtggaagaggaagagaaagtgcctgtgaggcccaaggaccctgagggggttcctcctctcctggtctctcaacaggcaaaacgggaggaggagcgcagcccagctgccccaccacctctgcctaccacctcctctggcaaggctgcaaagaaacccacagctgcagagatctctgttcgagtccctagagggccggccgtggaagggggacacgtgaatatggcattctctcagtccaaccctccttcggagttgcacaaggtccacggatccagaaacaagcccaccagcttgtggaacccaacgtacggctcctggtttacagagaaacccaccaaaaagaataatcctatagcaaagaaggagccacacgacaggggtaacctggggctggagggaagctgtactgtcccacctaacgttgcaactgggagacttccgggggcctcactgctcctagagccctcttcgctgactgccaatatgaaggaggtacctctgttcaggctacgtcacttcccttgtgggaatgtcaattacggctaccagcaacagggcttgcccttagaagccgctactgcccctggagctggtcattacgaggataccattctgaaaagcaagaatagcatgaaccagcctgggccctga

SEQ ID NO: 204 - protein, 1620 aa, Homo sapiens
  Amino acid sequence of Ki1
MGAIGLLWLLPLLLSTAAVGSGMGTGQRAGSPAAGPPLQPREPLSYSRLQRKSLAVDFVVPSLFRVYARDLLLPPSSSELKAGRPEARGSLALDCAPLLRLLGPAPGVSWTAGSPAPAEARTLSRVLKGGSVRKLRRAKQLVLELGEEAILEGCVGPPGEAAVGLLQFNLSELFSWWIRQGEGRLRIRLMPEKKASEVGREGRLSAAIRASQPRLLFQIFGTGHSSLESPTNMPSPSPDYFTWNLTWIMKDSFPFLSHRSRYGLECSFDFPCELEYSPPLHDLRNQSWSWRRIPSEEASQMDLLDGPGAERSKEMPRGSFLLLNTSADSKHTILSPWMRSSSEHCTLAVSVHRHLQPSGRYIAQLLPHNEAAREILLMPTPGKHGWTVLQGRIGRPDNPFRVALEYISSGNRSLSAVDFFALKNCSEGTSPGSKMALQSSFTCWNGTVLQLGQACDFHQDCAQGEDESQMCRKLPVGFYCNFEDGFCGWTQGTLSPHTPQWQVRTLKDARFQDHQDHALLLSTTDVPASESATVTSATFPAPIKSSPCELRMSWLIRGVLRGNVSLVLVENKTGKEQGRMVWHVAAYEGLSLWQWMVLPLLDVSDRFWLQMVAWWGQGSRAIVAFDNISISLDCYLTISGEDKILQNTAPKSRNLFERNPNKELKPGENSPRQTPIFDPTVHWLFTTCGASGPHGPTQAQCNNAYQNSNLSVEVGSEGPLKGIQIWKVPATDTYSISGYGAAGGKGGKNTMMRSHGVSVLGIFNLEKDDMLYILVGQQGEDACPSTNQLIQKVCIGENNVIEEEIRVNRSVHEWAGGGGGGGGATYVFKMKDGVPVPLIIAAGGGGRAYGAKTDTFHPERLENNSSVLGLNGNSGAAGGGGGWNDNTSLLWAGKSLQEGATGGHSCPQAMKKWGWETRGGFGGGGGGCSSGGGGGGYIGGNAASNNDPEMDGEDGVSFISPLGILYTPALKVMEGHGEVNIKHYLNCSHCEVDECHMDPESHKVICFCDHGTVLAEDGVSCIVSPTPEPHLPLSLILSVVTSALVAALVLAFSGIMIVYRRKHQELQAMQMELQSPEYKLSKLRTSTIMTDYNPNYCFAGKTSSISDLKEVPRKNITLIRGLGHGAFGEVYEGQVSGMPNDPSPLQVAVKTLPEVCSEQDELDFLMEALIISKFNHQNIVRCIGVSLQSLPRFILLELMAGGDLKSFLRETRPRPSQPSSLAMLDLLHVARDIACGCQYLEENHFIHRDIAARNCLLTCPGPGRVAKIGDFGMARDIYRASYYRKGGCAMLPVKWMPPEAFMEGIFTSKTDTWSFGVLLWEIFSLGYMPYPSKSNQEVLEFVTSGGRMDPPKNCPGPVYRIMTQCWQHQPEDRPNFAIILERIEYCTQDPDVINTALPIEYGPLVEEEEKVPVRPKDPEGVPPLLVSQQAKREEERSPAAPPPLPTTSSGKAAKKPTAAEISVRVPRGPAVEGGHVNMAFSQSNPPSELHKVHGSRNKPTSLWNPTYGSWFTEKPTKKNNPIAKKEPHDRGNLGLEGSCTVPPNVATGRLPGASLLLEPSSLTANMKEVPLFRLRHFPCGNVNYGYQQQGLPLEAATAPGAGHYEDTILKSKNSMNQPGP

SEQ ID NO: 205 - DNA, 2595 bp, Homo sapiens
  Coding sequence for LTK
atgggctgctggggacagctgctggtgtggttcggagccgcgggcgccattctctgctctagcccggggtcccaggagacttttctgcggtcctcgcccctgccgctggcaagtcccagcccccgggacccgaaagtcagcgccccgcctagtatcttggagccagcctccccgctgaattctccgggcaccgaggggtcttggctgttttctacctgcggggccagcggccggcatgggcccacacagacacaatgtgacggggcgtacgcggggaccagcgtggtggtgaccgtgggggccgccgggcagctgagaggcgtgcagctgtggcgcgtgccgggccctggccagtatctgatctcagcctacggagccgcgggcggcaaaggcgccaagaaccacctgtcgcgggcgcatggcgtcttcgtctcagcaatcttctccctcggtctcggggagtcgctgtacatcctggtggggcagcagggagaggacgcctgtcccggaggtagcccggagagccagctcgtctgcctcggggagtctcgagccgttgaagagcacgcggcgatggatgggagcgaaggggtcccggggtcgcggcgctgggcgggaggtggcgggggtggcgggggcgccacctacgttttccgggtgcgcgctggcgagctggaaccgttgctggtggcggccggaggcggcggtcgggcctacctgaggccgcgggaccgaggccggactcaggcctcccccgagaaactggagaaccgctcggaggcgcccgggagcggcgggagaggcggggcggcaggtggtgggggcggctggacgtcgcgggctccctctccgcaggccggccgctcactgcaggagggggcggagggcggccagggctgctccgaggcttgggcgacccttggctgggccgcggccggcggcttcgggggcggcggcggggcctgcactgcgggcggaggcggcggcggctacagggggggcgacgcttcagagactgacaacctctgggctgatggggaagatggagtatccttcatacaccccagcagcgagctcttcctgcagcctctggcagtcaccgagaaccacggagaggtagagatccgaaggcacctcaactgcagtcactgccctttgagagactgccaatggcaggcagagctccagctggctgaatgcctgtgcccagaaggcatggagctagctgtggataacgtcacctgcatggacctgcacaagcccccaggccctctggttctgatggtggctgtggtggcaacctcaacactgagcctccttatggtgtgtggggtcctgattctggtgaagcagaagaagtggcagggcctgcaggagatgaggctgccgagccctgagcttgagctgagcaagcttcgaacctctgccatcaggacagcccccaatccctattattgccaggtggggcttggcccggcccagtcctggcctctgccaccaggtgtcaccgaggtttccccagccaatgttactctgctcagagccctgggccatggtgcctttggggaggtgtatgagggactggtaattggccttcctggggactccagtcccctgcaggtagctatcaagaccctgccagaactctgctcgcctcaggatgagctggatttcctcatggaggccctcatcatcagcaagtttcgccatcagaacattgtgcggtgtgtggggctcagcctcagggccacccctcgcctcattctgctggaactgatgtctggaggggacatgaagagtttcctgaggcacagtcggccacacctgggccagccatcacctctggtcatgcgggacctgctgcaactggcccaggacatagcccagggctgccactacctggaggaaaatcacttcatccacagggatattgccgcccggaactgcctgctgagctgcgctggacccagccgagtggccaagattggggactttgggatggcacgagatatctaccgggccagttattaccgcaggggggaccgggccttgctcccagtcaagtggatgcccccagaggccttcctggagggcatcttcacatccaagacagattcctggtcttttggggtgctgctctgggagatcttctcactgggctacatgccctatcctgggcgcaccaaccaggaggtgctggacttcgtcgttggaggaggccggatggaccctcctaggggctgcccagggcctgtgtaccgcatcatgacccagtgttggcagcacgagcctgagctccgccctagctttgccagcatcttggagcgtctgcagtactgcactcaggacccggatgtgctgaattcactcctgccaatggagctggggcccaccccagaggaggaagggacttctgggctggggaacagatctttggagtgcctaagacccccacagccccaggaactgagtccagagaagttgaaaagctggggaggtagccctcttggcccctggctgtcctctggcctcaagcccctcaaatccaggggcctccaacctcagaacctttggaatcccacttatcgctcctga

SEQ ID NO: 206 - protein, 864 aa, Homo sapiens
  Amino acid sequence of TYK1
MGCWGQLLVWFGAAGAILCSSPGSQETFLRSSPLPLASPSPRDPKVSAPPSILEPASPLNSPGTEGSWLFSTCGASGRHGPTQTQCDGAYAGTSVVVTVGAAGQLRGVQLWRVPGPGQYLISAYGAAGGKGAKNHLSRAHGVFVSAIFSLGLGESLYILVGQQGEDACPGGSPESQLVCLGESRAVEEHAAMDGSEGVPGSRRWAGGGGGGGGATYVFRVRAGELEPLLVAAGGGGRAYLRPRDRGRTQASPEKLENRSEAPGSGGRGGAAGGGGGWTSRAPSPQAGRSLQEGAEGGQGCSEAWATLGWAAAGGFGGGGGACTAGGGGGGYRGGDASETDNLWADGEDGVSFIHPSSELFLQPLAVTENHGEVEIRRHLNCSHCPLRDCQWQAELQLAECLCPEGMELAVDNVTCMDLHKPPGPLVLMVAVVATSTLSLLMVCGVLILVKQKKWQGLQEMRLPSPELELSKLRTSAIRTAPNPYYCQVGLGPAQSWPLPPGVTEVSPANVTLLRALGHGAFGEVYEGLVIGLPGDSSPLQVAIKTLPELCSPQDELDFLMEALIISKFRHQNIVRCVGLSLRATPRLILLELMSGGDMKSFLRHSRPHLGQPSPLVMRDLLQLAQDIAQGCHYLEENHFIHRDIAARNCLLSCAGPSRVAKIGDFGMARDIYRASYYRRGDRALLPVKWMPPEAFLEGIFTSKTDSWSFGVLLWEIFSLGYMPYPGRTNQEVLDFVVGGGRMDPPRGCPGPVYRIMTQCWQHEPELRPSFASILERLQYCTQDPDVLNSLLPMELGPTPEEEGTSGLGNRSLECLRPPQPQELSPEKLKSWGGSPLGPWLSSGLKPLKSRGLQPQNLWNPTYRS

SEQ ID NO: 207 - DNA, 2814 bp, Homo sapiens
  Coding sequence for ROR1
atgcaccggccgcgccgccgcgggacgcgcccgccgctcctggcgctgctggccgcgctgctgctggccgcacgcggggctgctgcccaagaaacagagctgtcagtcagtgctgaattagtgcctacctcatcatggaacatctcaagtgaactcaacaaagattcttacctgacccttgatgaaccaatgaataacatcaccacgtctctgggccagacagcagaactgcactgcaaagtctctgggaatccacctcccaccatccgctggttcaaaaatgatgctcctgtggtccaggagccccggaggctctcctttcggtccaccatctatggctctcggctgcggattagaaacctcgacaccacagacacaggctacttccagtgcgtggcaacaaacggcaaggaggtggtttcttccactggagtcttgtttgtcaagtttggcccccctcccactgcaagtccaggatactcagatgagtatgaagaagatggattctgtcagccatacagagggattgcatgtgcaagatttattggcaaccgcaccgtctatatggagtctttgcacatgcaaggggaaatagaaaatcagatcacagctgccttcactatgattggcacttccagtcacttatctgataagtgttctcagttcgccattccttccctgtgccactatgccttcccgtactgcgatgaaacttcatccgtcccaaagccccgtgacttgtgtcgcgatgaatgtgaaatcctggagaatgtcctgtgtcaaacagagtacatttttgcaagatcaaatcccatgattctgatgaggctgaaactgccaaactgtgaagatctcccccagccagagagcccagaagctgcgaactgtatccggattggaattcccatggcagatcctataaataaaaatcacaagtgttataacagcacaggtgtggactaccgggggaccgtcagtgtgaccaaatcagggcgccagtgccagccatggaattcccagtatccccacacacacactttcaccgcccttcgtttcccagagctgaatggaggccattcctactgccgcaacccagggaatcaaaaggaagctccctggtgcttcaccttggatgaaaactttaagtctgatctgtgtgacatcccagcttgcgattcaaaggattccaaggagaagaataaaatggaaatcctgtacatactagtgccaagtgtggccattcccctggccattgctttactcttcttcttcatttgcgtctgtcggaataaccagaagtcatcgtcggcaccagtccagaggcaaccaaaacacgtcagaggtcaaaatgtggagatgtcaatgctgaatgcatataaacccaagagcaaggctaaagagctacctctttctgctgtacgctttatggaagaattgggtgagtgtgcctttggaaaaatctataaaggccatctctatctcccaggcatggaccatgctcagctggttgctatcaagaccttgaaagactataacaacccccagcaatggatggaatttcaacaagaagcctccctaatggcagaactgcaccaccccaatattgtctgccttctaggtgccgtcactcaggaacaacctgtgtgcatgctttttgagtatattaatcagggggatctccatgagttcctcatcatgagatccccacactctgatgttggctgcagcagtgatgaagatgggactgtgaaatccagcctggaccacggagattttctgcacattgcaattcagattgcagctggcatggaatacctgtctagtcacttctttgtccacaaggaccttgcagctcgcaatattttaatcggagagcaacttcatgtaaagatttcagacttggggctttccagagaaatttactccgctgattactacagggtccagagtaagtccttgctgcccattcgctggatgccccctgaagccatcatgtatggcaaattctcttctgattcagatatctggtcctttggggttgtcttgtgggagattttcagttttggactccagccatattatggattcagtaaccaggaagtgattgagatggtgagaaaacggcagctcttaccatgctctgaagactgcccacccagaatgtacagcctcatgacagagtgctggaatgagattccttctaggagaccaagatttaaagatattcacgtccggcttcggtcctgggagggactctcaagtcacacaagctctactactccttcagggggaaatgccaccacacagacaacctccctcagtgccagcccagtgagtaatctcagtaaccccagatatcctaattacatgttcccgagccagggtattacaccacagggccagattgctggtttcattggcccgccaatacctcagaaccagcgattcattcccatcaatggatacccaatacctcctggatatgcagcgtttccagctgcccactaccagccaacaggtcctcccagagtgattcagcactgcccacctcccaagagtcggtccccaagcagtgccagtgggtcgactagcactggccatgtgactagcttgccctcatcaggatccaatcaggaagcaaatattcctttactaccacacatgtcaattccaaatcatcctggtggaatgggtatcaccgtttttggcaacaaatctcaaaaaccctacaaaattgactcaaagcaagcatctttactaggagacgccaatattcatggacacaccgaatctatgatttctgcagaactgtaa

SEQ ID NO: 208 - protein, 937 aa, Homo sapiens
  Amino acid sequence of NTRKR1
MHRPRRRGTRPPLLALLAALLLAARGAAAQETELSVSAELVPTSSWNISSELNKDSYLTLDEPMNNITTSLGQTAELHCKVSGNPPPTIRWFKNDAPVVQEPRRLSFRSTIYGSRLRIRNLDTTDTGYFQCVATNGKEVVSSTGVLFVKFGPPPTASPGYSDEYEEDGFCQPYRGIACARFIGNRTVYMESLHMQGEIENQITAAFTMIGTSSHLSDKCSQFAIPSLCHYAFPYCDETSSVPKPRDLCRDECEILENVLCQTEYIFARSNPMILMRLKLPNCEDLPQPESPEAANCIRIGIPMADPINKNHKCYNSTGVDYRGTVSVTKSGRQCQPWNSQYPHTHTFTALRFPELNGGHSYCRNPGNQKEAPWCFTLDENFKSDLCDIPACDSKDSKEKNKMEILYILVPSVAIPLAIALLFFFICVCRNNQKSSSAPVQRQPKHVRGQNVEMSMLNAYKPKSKAKELPLSAVRFMEELGECAFGKIYKGHLYLPGMDHAQLVAIKTLKDYNNPQQWMEFQQEASLMAELHHPNIVCLLGAVTQEQPVCMLFEYINQGDLHEFLIMRSPHSDVGCSSDEDGTVKSSLDHGDFLHIAIQIAAGMEYLSSHFFVHKDLAARNILIGEQLHVKISDLGLSREIYSADYYRVQSKSLLPIRWMPPEAIMYGKFSSDSDIWSFGVVLWEIFSFGLQPYYGFSNQEVIEMVRKRQLLPCSEDCPPRMYSLMTECWNEIPSRRPRFKDIHVRLRSWEGLSSHTSSTTPSGGNATTQTTSLSASPVSNLSNPRYPNYMFPSQGITPQGQIAGFIGPPIPQNQRFIPINGYPIPPGYAAFPAAHYQPTGPPRVIQHCPPPKSRSPSSASGSTSTGHVTSLPSSGSNQEANIPLLPHMSIPNHPGGMGITVFGNKSQKPYKIDSKQASLLGDANIHGHTESMISAEL

SEQ ID NO: 209 - DNA, 2832 bp, Homo sapiens
  Coding sequence for ROR2
atggcccggggctcggcgctcccgcggcggccgctgctgtgcatcccggccgtctgggcggccgccgcgcttctgctctcagtgtcccggacttcaggtgaagtggaggttctggatccgaacgaccctttaggaccccttgatgggcaggacggcccgattccaactctgaaaggttactttctgaattttctggagccagtaaacaatatcaccattgtccaaggccagacggcaattctgcactgcaaggtggcaggaaacccaccccctaacgtgcggtggctaaagaatgatgccccggtggtgcaggagccgcggcggatcatcatccggaagacagaatatggttcacgactgcgaatccaggacctggacacgacagacactggctactaccagtgcgtggccaccaacgggatgaagaccattaccgccactggcgtcctgtttgtgcggctgggtccaacgcacagcccaaatcataactttcaggatgattaccacgaggatgggttctgccagccttaccggggaattgcctgtgcacgcttcattggcaaccggaccatttatgtggactcgcttcagatgcagggggagattgaaaaccgaatcacagcggccttcaccatgatcggcacgtctacgcacctgtcggaccagtgctcacagttcgccatcccatccttctgccacttcgtgtttcctctgtgcgacgcgcgctcccggacacccaagccgcgtgagctgtgccgcgacgagtgcgaggtgctggagagcgacctgtgccgccaggagtacaccatcgcccgctccaacccgctcatcctcatgcggcttcagctgcccaagtgtgaggcgctgcccatgcctgagagccccgacgctgccaactgcatgcgcattggcatcccagccgagaggctgggccgctaccatcagtgctataacggctcaggcatggattacagaggaacggcaagcaccaccaagtcaggccaccagtgccagccgtgggccctgcagcacccccacagccaccacctgtccagcacagacttccctgagcttggaggggggcacgcctactgccggaaccccggaggccagatggagggcccctggtgctttacgcagaataaaaacgtacgcatggaactgtgtgacgtaccctcgtgtagtccccgagacagcagcaagatggggattctgtacatcttggtccccagcatcgcaattccactggtcatcgcttgccttttcttcttggtttgcatgtgccggaataagcagaaggcatctgcgtccacaccgcagcggcgacagctgatggcctcgcccagccaagacatggaaatgcccctcattaaccagcacaaacaggccaaactcaaagagatcagcctgtctgcggtgaggttcatggaggagctgggagaggaccggtttgggaaagtctacaaaggtcacctgttcggccctgccccgggggagcagacccaggctgtggccatcaaaacgctgaaggacaaagcggaggggcccctgcgggaggagttccggcatgaggctatgctgcgagcacggctgcaacaccccaacgtcgtctgcctgctgggcgtggtgaccaaggaccagcccctgagcatgatcttcagctactgttcgcacggcgacctccacgaattcctggtcatgcgctcgccgcactcggacgtgggcagcaccgatgatgaccgcacggtgaagtccgccctggagccccccgacttcgtgcaccttgtggcacagatcgcggcggggatggagtacctatccagccaccacgtggttcacaaggacctggccacccgcaatgtgctagtgtacgacaagctgaacgtgaagatctcagacttgggcctcttccgagaggtgtatgccgccgattactacaagctgctggggaactcgctgctgcctatccgctggatggccccagaggccatcatgtacggcaagttctccatcgactcagacatctggtcctacggtgtggtcctgtgggaggtcttcagctacggcctgcagccctactgcgggtactccaaccaggatgtggtggagatgatccggaaccggcaggtgctgccttgccccgatgactgtcccgcctgggtgtatgccctcatgatcgagtgctggaacgagttccccagccggcggccccgcttcaaggacatccacagccggctccgagcctggggcaacctttccaactacaacagctcggcgcagacctcgggggccagcaacaccacgcagaccagctccctgagcaccagcccagtgagcaatgtgagcaacgcccgctacgtggggcccaagcagaaggccccgcccttcccacagccccagttcatccccatgaagggccagatcagacccatggtgcccccgccgcagctctacgtccccgtcaacggctaccagccggtgccggcctatggggcctacctgcccaacttctacccggtgcagatcccaatgcagatggccccgcagcaggtgcctcctcagatggtccccaagcccagctcacaccacagtggcagtggctccaccagcacaggctacgtcaccacggccccctccaacacatccatggcagacagggcagccctgctctcagagggcgctgatgacacacagaacgccccagaagatggggcccagagcaccgtgcaggaagcagaggaggaggaggaaggctctgtcccagagactgagctgctgggggactgtgacactctgcaggtggacgaggcccaagtccagctggaagcttga

SEQ ID NO: 210 - protein, 943 aa, Homo sapiens
  Amino acid sequence of NTRKR2
MARGSALPRRPLLCIPAVWAAAALLLSVSRTSGEVEVLDPNDPLGPLDGQDGPIPTLKGYFLNFLEPVNNITIVQGQTAILHCKVAGNPPPNVRWLKNDAPVVQEPRRIIIRKTEYGSRLRIQDLDTTDTGYYQCVATNGMKTITATGVLFVRLGPTHSPNHNFQDDYHEDGFCQPYRGIACARFIGNRTIYVDSLQMQGEIENRITAAFTMIGTSTHLSDQCSQFAIPSFCHFVFPLCDARSRTPKPRELCRDECEVLESDLCRQEYTIARSNPLILMRLQLPKCEALPMPESPDAANCMRIGIPAERLGRYHQCYNGSGMDYRGTASTTKSGHQCQPWALQHPHSHHLSSTDFPELGGGHAYCRNPGGQMEGPWCFTQNKNVRMELCDVPSCSPRDSSKMGILYILVPSIAIPLVIACLFFLVCMCRNKQKASASTPQRRQLMASPSQDMEMPLINQHKQAKLKEISLSAVRFMEELGEDRFGKVYKGHLFGPAPGEQTQAVAIKTLKDKAEGPLREEFRHEAMLRARLQHPNVVCLLGVVTKDQPLSMIFSYCSHGDLHEFLVMRSPHSDVGSTDDDRTVKSALEPPDFVHLVAQIAAGMEYLSSHHVVHKDLATRNVLVYDKLNVKISDLGLFREVYAADYYKLLGNSLLPIRWMAPEAIMYGKFSIDSDIWSYGVVLWEVFSYGLQPYCGYSNQDVVEMIRNRQVLPCPDDCPAWVYALMIECWNEFPSRRPRFKDIHSRLRAWGNLSNYNSSAQTSGASNTTQTSSLSTSPVSNVSNARYVGPKQKAPPFPQPQFIPMKGQIRPMVPPPQLYVPVNGYQPVPAYGAYLPNFYPVQIPMQMAPQQVPPQMVPKPSSHHSGSGSTSTGYVTTAPSNTSMADRAALLSEGADDTQNAPEDGAQSTVQEAEEEEEGSVPETELLGDCDTLQVDEAQVQLEA

SEQ ID NO: 211 - DNA, 1821 bp, Homo sapiens
  Coding sequence for RYK
atgcgtggggcggcgcggctggggcggccgggccggagttgcctcccggggcccgcgctgagggccgccgccgcgcccgccctgctgcttgctcgttgcgctgttgccgctgctgccggcctgcgtgccgccgcccgtccgcggcccccggagctgcagtcggcttccgcggggcccagcgtgagtctctacctgagcgaggacgaggtgcgccggctgatcggtcttgatgcagaactttattatgtgagaaatgaccttattagtcactacgctctatcctttaatctgttagtacccagtgagacaaatttcctgcacttcacctggcatgcgaagtccaaggttgaatataagctgggattccaagtggacaatgttttggcaatggatatgccccaggtcaacatttctgttcagggggaagttccacgcactttatcagtgtttcgggtagagctttcctgtactggcaaagtagattctgaagttatgatactaatgcagctcaacttgacagtaaattcttcaaaaaattttaccgtcttaaattttaaacgaaggaaaatgtgctacaaaaaacttgaagaagtaaaaacttcagccttggacaaaaacactagcagaactatttatgatcctgtacatgcagctccaaccacttctacgcgtgtgttttatattagtgtaggggtttgttgtgcagtaatatttctcgtagcaataatattagctgttttgcaccttcataatatgaaaaggattgaactggatgacagcattagtgccagcagtagttcccaagggctgtctcagccatccacccagacgactcagtatctgagagcagacacgcccaacaatgcaactcctatcaccagttatcctaccttgcggatagagaagaacgacttgagaagtgtcactcttttggaggccaaaggcaaggtgaaggatatagcaatatccagagagaggataactctaaaagatgtactccaagaaggtacttttgggcgtattttccatgggattttaatagatgaaaaagatccaaataaagaaaaacaagcatttgtcaaaacagttaaagatcaagcttctgaaattcaggtgacaatgatgctcactgaaagttgtaagctgcgaggtcttcatcacagaaatcttcttcctattactcatgtgtgtatagaagaaggagaaaagcccatggtgatattgccttacatgaattgggggaatcttaaattgtttttacgacagtgcaagttagtagaggccaataatccacaggcaatttctcagcaagacctggtacacatggctattcagattgcctgtggaatgagctacctggccagaagggaagtcatccacaaagacctggctgccaggaactgtgtcattgatgacacacttcaagttaagatcacagacaatgccctctccagagacttgttccccatggactatcactgtctgggggacaatgaaaacaggccagttcgttggatggctcttgaaagtctggttaataacgagttctctagcgctagtgatgtgtgggcctttggagtgaacagcttgtgggaactcatgactctgggccagactccctacacgttggacattgaccccttcgagatggcggcatacctgaaagatggttaccgaatagcccagccaatcacctgtcctgatgaattatttgctgtgatggcctgttgctgggccttagatccagaggagaggcccaggtttcagcagctggtacagtgcctaacagagtttcatgcagccctgggggcctacgtctga

SEQ ID NO: 212 - protein, 606 aa, Homo sapiens [sequence omitted]

SEQ ID NO: 213 - DNA, 3213 bp, Homo sapiens
  Coding sequence for PTK7
atgggagctgcgcggggatccccggccagaccccgccggttgcctctgctcagcgtcctgctgctgccgctgctgggcggtacccagacagccattgtcttcatcaagcagccgtcctcccaggatgcactgcaggggcgccgggcgctgcttcgctgtgaggttgaggctccgggcccggtacatgtgtactggctgctcgatggggcccctgtccaggacacggagcggcgtttcgcccagggcagcagcctgagctttgcagctgtggaccggctgcaggactctggcaccttccagtgtgtggctcgggatgatgtcactggagaagaagcccgcagtgccaacgcctccttcaacatcaaatggattgaggcaggtcctgtggtcctgaagcatccagcctcggaagctgagatccagccacagacccaggtcacacttcgttgccacattgatgggcaccctcggcccacctaccaatggttccgagatgggacccccctttctgatggtcagagcaaccacacagtcagcagcaaggagcggaacctgacgctccggccagctggtcctgagcatagtgggctgtattcctgctgcgcccacagtgcttttggccaggcttgcagcagccagaacttcaccttgagcattgctgatgaaagctttgccagggtggtgctggcaccccaggacgtggtagtagcgaggtatgaggaggccatgttccattgccagttctcagcccagccacccccgagcctgcagtggctctttgaggatgagactcccatcactaaccgcagtcgccccccacacctccgcagagccacagtgtttgccaacgggtctctgctgctgacccaggtccggccacgcaatgcagggatctaccgctgcattggccaggggcagaggggcccacccatcatcctggaagccacacttcacctagcagagattgaagacatgccgctatttgagccacgggtgtttacagctggcagcgaggagcgtgtgacctgccttccccccaagggtctgccagagcccagcgtgtggtgggagcacgcgggagtccggctgcccacccatggcagggtctaccagaagggccacgagctggtgttggccaatattgctgaaagtgatgctggtgtctacacctgccacgcggccaacctggctggtcagcggagacaggatgtcaacatcactgtggccactgtgccctcctggctgaagaagccccaagacagccagctggaggagggcaaacccggctacttggattgcctgacccaggccacaccaaaacctacagttgtctggtacagaaaccagatgctcatctcagaggactcacggttcgaggtcttcaagaatgggaccttgcgcatcaacagcgtggaggtgtatgatgggacatggtaccgttgtatgagcagcaccccagccggcagcatcgaggcgcaagcccgtgtccaagtgctggaaaagctcaagttcacaccaccaccccagccacagcagtgcatggagtttgacaaggaggccacggtgccctgttcagccacaggccgagagaagcccactattaagtgggaacgggcagatgggagcagcctcccagagtgggtgacagacaacgctgggaccctgcattttgcccgggtgactcgagatgacgctggcaactacacttgcattgcctccaacgggccgcagggccagattcgtgcccatgtccagctcactgtggcagtttttatcaccttcaaagtggaaccagagcgtacgactgtgtaccagggccacacagccctactgcagtgcgaggcccagggggaccccaagccgctgattcagtggaaaggcaaggaccgcatcctggaccccaccaagctgggacccaggatgcacatcttccagaatggctccctggtgatccatgacgtggcccctgaggactcaggccgctacacctgcattgcaggcaacagctgcaacatcaagcacacggaggcccccctctatgtcgtggacaagcctgtgccggaggagtcggagggccctggcagccctcccccctacaagatgatccagaccattgggttgtcggtgggtgccgctgtggcctacatcattgccgtgctgggcctcatgttctactgcaagaagcgctgcaaagccaagcggctgcagaagcagcccgagggcgaggagccagagatggaatgcctcaacggtgggcctttgcagaacgggcagccctcagcagagatccaagaagaagtggccttgaccagcttgggctccggccccgcggccaccaacaaacgccacagcacaagtgataagatgcacttcccacggtctagcctgcagcccatcaccacgctggggaagagtgagtttggggaggtgttcctggcaaaggctcagggcttggaggagggagtggcagagaccctggtacttgtgaagagcctgcagagcaaggatgagcagcagcagctggacttccggagggagttggagatgtttgggaagctgaaccacgccaacgtggtgcggctcctggggctgtgccgggaggctgagccccactacatggtgctggaatatgtggatctgggagacctcaagcagttcctgaggatttccaagagcaaggatgaaaaattgaagtcacagcccctcagcaccaagcagaaggtggccctatgcacccaggtagccctgggcatggagcacctgtccaacaaccgctttgtgcataaggacttggctgcgcgtaactgcctggtcagtgcccagagacaagtgaaggtgtctgccctgggcctcagcaaggatgtgtacaacagtgagtactaccacttccgccaggcctgggtgccgctgcgctggatgtcccccgaggccatcctggagggtgacttctctaccaagtctgatgtctgggccttcggtgtgctgatgtgggaagtgtttacacatggagagatgccccatggtgggcaggcagatgatgaagtactggcagatttgcaggctgggaaggctagacttcctcagcccgagggctgcccttccaaactctatcggctgatgcagcgctgctgggccctcagccccaaggaccggccctccttcagtgagattgccagcgccctgggagacagcaccgtggacagcaagccgtga

SEQ ID NO: 214 - protein, 1070 aa, Homo sapiens
  Amino acid sequence of CCK4
MGAARGSPARPRRLPLLSVLLLPLLGGTQTAIVFIKQPSSQDALQGRRALLRCEVEAPGPVHVYWLLDGAPVQDTERRFAQGSSLSFAAVDRLQDSGTFQCVARDDVTGEEARSANASFNIKWIEAGPVVLKHPASEAEIQPQTQVTLRCHIDGHPRPTYQWFRDGTPLSDGQSNHTVSSKERNLTLRPAGPEHSGLYSCCAHSAFGQACSSQNFTLSIADESFARVVLAPQDVVVARYEEAMFHCQFSAQPPPSLQWLFEDETPITNRSRPPHLRRATVFANGSLLLTQVRPRNAGIYRCIGQGQRGPPIILEATLHLAEIEDMPLFEPRVFTAGSEERVTCLPPKGLPEPSVWWEHAGVRLPTHGRVYQKGHELVLANIAESDAGVYTCHAANLAGQRRQDVNITVATVPSWLKKPQDSQLEEGKPGYLDCLTQATPKPTVVWYRNQMLISEDSRFEVFKNGTLRINSVEVYDGTWYRCMSSTPAGSIEAQARVQVLEKLKFTPPPQPQQCMEFDKEATVPCSATGREKPTIKWERADGSSLPEWVTDNAGTLHFARVTRDDAGNYTCIASNGPQGQIRAHVQLTVAVFITFKVEPERTTVYQGHTALLQCEAQGDPKPLIQWKGKDRILDPTKLGPRMHIFQNGSLVIHDVAPEDSGRYTCIAGNSCNIKHTEAPLYVVDKPVPEESEGPGSPPPYKMIQTIGLSVGAAVAYIIAVLGLMFYCKKRCKAKRLQKQPEGEEPEMECLNGGPLQNGQPSAEIQEEVALTSLGSGPAATNKRHSTSDKMHFPRSSLQPITTLGKSEFGEVFLAKAQGLEEGVAETLVLVKSLQSKDEQQQLDFRRELEMFGKLNHANVVRLLGLCREAEPHYMVLEYVDLGDLKQFLRISKSKDEKLKSQPLSTKQKVALCTQVALGMEHLSNNRFVHKDLAARNCLVSAQRQVKVSALGLSKDVYNSEYYHFRQAWVPLRWMSPEAILEGDFSTKSDVWAFGVLMWEVFTHGEMPHGGQADDEVLADLQAGKARLPQPEGCPSKLYRLMQRCWALSPKDRPSFSEIASALGDSTVDSKP

SEQ ID NO: 215 - DNA, 2610 bp, Homo sapiens
  Coding sequence for MUSK
atgagagagctcgtcaacattccactggtacatattcttactctggttgccttcagcggaactgagaaacttccaaaagctcctgtcatcaccactcctcttgaaacagtggatgccttagttgaagaagtggctactttcatgtgtgcagtggaatcctacccccagcctgagatttcctggactagaaataaaattctcattaaactctttgacacccggtacagcatccgggagaatgggcagctcctcaccatcctgagtgtggaagacagtgatgatggcatttactgctgcacggccaacaatggtgtgggaggagctgtggagagttgtggagccctgcaagtgaagatgaaacctaaaataactcgccctcccataaatgtgaaaataatagagggattaaaagcagtcctaccatgtactacaatgggtaatcccaaaccatcagtgtcttggataaagggagacagccctctcagggaaaattcccgaattgcagttcttgaatctgggagcttgaggattcataacgtacaaaaggaagatgcaggacagtatcgatgtgtggcaaaaaacagcctcgggacagcatattccaaagtggtgaagctggaagttgaggtttttgccaggatcctgcgggctcctgaatcccacaatgtcacctttggctcctttgtgaccctgcactgtacagcaacaggcattcctgtccccaccatcacctggattgaaaacggaaatgctgtttcttctgggtccattcaagagagtgtgaaagaccgagtgattgactcaagactgcagctgtttatcaccaagccaggactctacacatgcatagctaccaataagcatggggagaagttcagtactgccaaggctgcagccaccatcagcatagcagaatggagtaaaccacagaaagataacaaaggctactgcgcccagtacagaggggaggtgtgtaatgcagtcctggcaaaagatgctcttgtttttctcaacacctcctatgcggaccctgaggaggcccaagagctactggtccacacggcctggaatgaactgaaagtagtgagcccagtctgccggccagctgctgaggctttgttgtgtaaccacatcttccaggagtgcagtcctggagtagtgcctactcctattcccatttgcagagagtactgcttggcagtaaaggagctcttctgcgcaaaagaatggctggtaatggaagagaagacccacagaggactctacagatccgagatgcatttgctgtccgtgccagaatgcagcaagcttcccagcatgcattgggaccccacggcctgtgccagactgccacatctagattataacaaagaaaacctaaaaacattcccaccaatgacgtcctcaaagccaagtgtggacattccaaatctgccttcctcctcctcttcttccttctctgtctcacctacatactccatgactgtaataatctccatcatgtccagctttgcaatatttgtgcttcttaccataactactctctattgctgccgaagaagaaaacaatggaaaaataagaaaagagaatcagcagcagtaaccctcaccacactgccttctgagctcttactagatagacttcatcccaaccccatgtaccagaggatgccgctccttctgaaccccaaattgctcagcctggagtatccaaggaataacattgaatatgtgagagacatcggagagggagcgtttggaagggtgtttcaagcaagggcaccaggcttacttccctatgaacctttcactatggtggcagtaaagatgctcaaagaagaagcctcggcagatatgcaagcggactttcagagggaggcagccctcatggcagaatttgacaaccctaacattgtgaagctattaggagtgtgtgctgtcgggaagccaatgtgcctgctctttgaatacatggcctatggtgacctcaatgagttcctccgcagcatgtcccctcacaccgtgtgcagcctcagtcacagtgacttgtctatgagggctcaggtctccagccctgggcccccacccctctcctgtgctgagcagctttgcattgccaggcaggtggcagctggcatggcttacctctcagaacgtaagtttgttcaccgagatttagccaccaggaactgcctggtgggcgagaacatggtggtgaaaattgccgactttggcctctccaggaacatctactcagcagactactacaaagctaatgaaaacgacgctatccctatccgttggatgccaccagagtccattttttataaccgctacactacagagtctgatgtgtgggcctatggcgtggtcctctgggagatcttctcctatggcctgcagccctactatgggatggcccatgaggaggtcatttactacgtgcgagatggcaacatcctctcctgccctgagaactgccccgtggagctgtacaatctcatgcgtctatgttggagcaagctgcctgcagacagacccagtttcaccagtattcaccgaattctggaacgcatgtgtgagagggcagagggaactgtgagtgtctaa

SEQ ID NO: 216 - protein, 869 aa, Homo sapiens
  Amino acid sequence of MUSK
MRELVNIPLVHILTLVAFSGTEKLPKAPVITTPLETVDALVEEVATFMCAVESYPQPEISWTRNKILIKLFDTRYSIRENGQLLTILSVEDSDDGIYCCTANNGVGGAVESCGALQVKMKPKITRPPINVKIIEGLKAVLPCTTMGNPKPSVSWIKGDSPLRENSRIAVLESGSLRIHNVQKEDAGQYRCVAKNSLGTAYSKVVKLEVEVFARILRAPESHNVTFGSFVTLHCTATGIPVPTITWIENGNAVSSGSIQESVKDRVIDSRLQLFITKPGLYTCIATNKHGEKFSTAKAAATISIAEWSKPQKDNKGYCAQYRGEVCNAVLAKDALVFLNTSYADPEEAQELLVHTAWNELKVVSPVCRPAAEALLCNHIFQECSPGVVPTPIPICREYCLAVKELFCAKEWLVMEEKTHRGLYRSEMHLLSVPECSKLPSMHWDPTACARLPHLDYNKENLKTFPPMTSSKPSVDIPNLPSSSSSSFSVSPTYSMTVIISIMSSFAIFVLLTITTLYCCRRRKQWKNKKRESAAVTLTTLPSELLLDRLHPNPMYQRMPLLLNPKLLSLEYPRNNIEYVRDIGEGAFGRVFQARAPGLLPYEPFTMVAVKMLKEEASADMQADFQREAALMAEFDNPNIVKLLGVCAVGKPMCLLFEYMAYGDLNEFLRSMSPHTVCSLSHSDLSMRAQVSSPGPPPLSCAEQLCIARQVAAGMAYLSERKFVHRDLATRNCLVGENMVVKIADFGLSRNIYSADYYKANENDAIPIRWMPPESIFYNRYTTESDVWAYGVVLWEIFSYGLQPYYGMAHEEVIYYVRDGNILSCPENCPVELYNLMRLCWSKLPADRPSFTSIHRILERMCERAEGTVSV

SEQ ID NO: 217 - DNA, 1410 bp, Homo sapiens
  Coding sequence for GFP2-GRB2
atggtgagcaagggcgaggagctgttcaccggggtggtgcccatcctggtcgagctggacggcgacgtaaacggccacaagttcagcgtgtccggcgagggcgagggcgatgccacctacggcaagctgaccctgaagttcatctgcaccaccggcaagctgcccgtgccctggcccaccctcgtgaccaccctgagctacggcgtgcagtgcttcagccgctaccccgaccacatgaagcagcacgacttcttcaagtccgccatgcccgaaggctacgtccaggagcgcaccatcttcttcaaggacgacggcaactacaagacccgcgccgaggtgaagttcgagggcgacaccctggtgaaccgcatcgagctgaagggcatcgacttcaaggaggacggcaacatcctggggcacaagctggagtacaactacaacagccacaacgtctatatcatggccgacaagcagaagaacggcatcaaggtgaacttcaagatccgccacaacatcgaggacggcagcgtgcagctcgccgaccactaccagcagaacacccccatcggcgacggccccgtgctgctgcccgacaaccactacctgagcacccagtccgccctgagcaaagaccccaacgagaagcgcgatcacatggtcctgctggagttcgtgaccgccgccgggatcactctcggcatggacgagctgtacaagtccggactcagatctccggcgagctctcgagaattcggaatggaagccatcgccaaatatgacttcaaagctactgcagacgacgagctgagcttcaaaaggggggacatcctcaaggttttgaacgaagaatgtgatcagaactggtacaaggcagagcttaatggaaaagacggcttcattcccaagaactacatagaaatgaaaccacatccgtggttttttggcaaaatccccagagccaaggcagaagaaatgcttagcaaacagcggcacgatggggcctttcttatccgagagagtgagagcgctcctggggacttctccctctctgtcaagtttggaaacgatgtgcagcacttcaaggtgctccgagatggagccgggaagtacttcctctgggtggtgaagttcaattctttgaatgagctggtggattatcacagatctacatctgtctccagaaaccagcagatattcctgcgggacatagaacaggtgccacagcagccgacatacgtccaggccctctttgactttgatccccaggaggatggagagctgggcttccgccggggagattttatccatgtcatggataactcagaccccaactggtggaaaggagcttgccacgggcagaccggcatgtttccccgcaattatgtcacccccgtgaaccggaacgtctaa

SEQ ID NO: 218 - protein, 469 aa, Homo sapiens
  Amino acid sequence for GFP2-Grb2
MVSKGEELFTGVVPILVELDGDVNGHKFSVSGEGEGDATYGKLTLKFICTTGKLPVPWPTLVTTLSYGVQCFSRYPDHMKQHDFFKSAMPEGYVQERTIFFKDDGNYKTRAEVKFEGDTLVNRIELKGIDFKEDGNILGHKLEYNYNSHNVYIMADKQKNGIKVNFKIRHNIEDGSVQLADHYQQNTPIGDGPVLLPDNHYLSTQSALSKDPNEKRDHMVLLEFVTAAGITLGMDELYKSGLRSPASSREFGMEAIAKYDFKATADDELSFKRGDILKVLNEECDQNWYKAELNGKDGFIPKNYIEMKPHPWFFGKIPRAKAEEMLSKQRHDGAFLIRESESAPGDFSLSVKFGNDVQHFKVLRDGAGKYFLWVVKFNSLNELVDYHRSTSVSRNQQIFLRDIEQVPQQPTYVQALFDFDPQEDGELGFRRGDFIHVMDNSDPNWWKGACHGQTGMFPRNYVTPVNRNV

SEQ ID NO: 219 - DNA, 36 bp, Homo sapiens
  GRB2 oligonucleotide
cagcggaattcggaatggaagccatcgccaaatatg

SEQ ID NO: 220 - DNA, 33 bp, Homo sapiens
  GRB2 oligonucleotide
cagctccgcggttagacgttccggttcacgggg

SEQ ID NO: 221 - DNA, 2019 bp, Homo sapiens
  Coding sequence for GFP2-SHCP46
atggtgagcaagggcgaggagctgttcaccggggtggtgcccatcctggtcgagctggacggcgacgtaaacggccacaagttcagcgtgtccggcgagggcgagggcgatgccacctacggcaagctgaccctgaagttcatctgcaccaccggcaagctgcccgtgccctggcccaccctcgtgaccaccctgagctacggcgtgcagtgcttcagccgctaccccgaccacatgaagcagcacgacttcttcaagtccgccatgcccgaaggctacgtccaggagcgcaccatcttcttcaaggacgacggcaactacaagacccgcgccgaggtgaagttcgagggcgacaccctggtgaaccgcatcgagctgaagggcatcgacttcaaggaggacggcaacatcctggggcacaagctggagtacaactacaacagccacaacgtctatatcatggccgacaagcagaagaacggcatcaaggtgaacttcaagatccgccacaacatcgaggacggcagcgtgcagctcgccgaccactaccagcagaacacccccatcggcgacggccccgtgctgctgcccgacaaccactacctgagcacccagtccgccctgagcaaagaccccaacgagaagcgcgatcacatggtcctgctggagttcgtgaccgccgccgggatcactctcggcatggacgagctgtacaagtccggactcagatctggcgagctcgtcatgggacctggggtttcctacttggttcggtacatgggctgtgtggaggtcttacagtcaatgcgagcccttgacttcaatacccggactcaggtcaccagggaggccatcagtttggtgtgtgaagctgtgcctggtgccaaaggggcgacaaggaggagaaagccttgtagccgcccactcagctccatcctggggaggagtaacctgaagtttgctggaatgccaatcactctcactgtatctaccagcagccttaacctcatggcagccgactgcaaacagatcattgccaaccatcacatgcaatctatctctttcgcgtccggtggggatccggacacagctgagtatgttgcctatgttgccaaagaccctgtgaatcagagagcctgccatatcctggagtgtcctgaagggcttgctcaggatgtcatcagcaccatcgggcaggcctttgagttgcgcttcaaacagtatctcaggaatccaccgaagctggtcaccccccatgacaggatggctggctttgatggctcagcttgggatgaggaggaagaagagccccctgaccatcagtactacaatgactttccagggaaggaaccccctcttggtggggtggtagatatgaggcttcgggaaggggctgctcgacccactctgcctagtgcccagatgtccagccacttgggagctacactgcctatagggcagcatgctgcaggagaccatgaagtccgtaaacagatgttgcctccgccgccttgcccaggcagagaactcttcgatgacccctcctatgtcaacatccagaatctagacaaggcccggcaggctgggggtggggctgggcccccaaatccttctcttaatggcagtgcaccccgagacctttttgacatgaagccctttgaagatgcacttcgggtgccacccccaccgcagtccatgtccatggctgagcagctgcaaggggagccctggttccacgggaagctgagccggagggaggccgaggcgctgctgcagctcaatggtgacttcttggtgcgagagagcacgaccacgcctggccagtatgtgctcactggcctgcagagtgggcagcccaagcacttgctgctggtggaccctgaaggtgtggttcggacaaaggatcaccgctttgagagtgtcagtcacctgatcagctaccacatggacaatcacttgcccatcatctctgcgggcagcgaactgtgcctacagcaacccgtggatcggaaagtgtga

SEQ ID NO: 222 - protein, 672 aa, Homo sapiens
  Amino acid sequence of GFP2-Shc46
MVSKGEELFTGVVPILVELDGDVNGHKFSVSGEGEGDATYGKLTLKFICTTGKLPVPWPTLVTTLSYGVQCFSRYPDHMKQHDFFKSAMPEGYVQERTIFFKDDGNYKTRAEVKFEGDTLVNRIELKGIDFKEDGNILGHKLEYNYNSHNVYIMADKQKNGIKVNFKIRHNIEDGSVQLADHYQQNTPIGDGPVLLPDNHYLSTQSALSKDPNEKRDHMVLLEFVTAAGITLGMDELYKSGLRSGELVMGPGVSYLVRYMGCVEVLQSMRALDFNTRTQVTREAISLVCEAVPGAKGATRRRKPCSRPLSSILGRSNLKFAGMPITLTVSTSSLNLMAADCKQIIANHHMQSISFASGGDPDTAEYVAYVAKDPVNQRACHILECPEGLAQDVISTIGQAFELRFKQYLRNPPKLVTPHDRMAGFDGSAWDEEEEEPPDHQYYNDFPGKEPPLGGVVDMRLREGAARPTLPSAQMSSHLGATLPIGQHAAGDHEVRKQMLPPPPCPGRELFDDPSYVNIQNLDKARQAGGGAGPPNPSLNGSAPRDLFDMKPFEDALRVPPPPQSMSMAEQLQGEPWFHGKLSRREAEALLQLNGDFLVRESTTTPGQYVLTGLQSGQPKHLLLVDPEGVVRTKDHRFESVSHLISYHMDNHLPIISAGSELCLQQPVDRKV

SEQ ID NO: 223 - DNA, 32 bp, Homo sapiens
  Grb2 oligonucleotide
cagcggagctcgtcatgggacctggggtttcc

SEQ ID NO: 224 - DNA, 31 bp, Homo sapiens
  Grb2 oligonucleotide
cagctggtacctcacactttccgatccacgg

SEQ ID NO: 225 - DNA, 4599 bp, Homo sapiens
  Coding sequence for EGFR-Luc
atgcgaccctccgggacggccggggcagcgctcctggcgctgctggctgcgctctgcccggcgagtcgggctctggaggaaaagaaagtttgccaaggcacgagtaacaagctcacgcagttgggcacttttgaagatcattttctcagcctccagaggatgttcaataactgtgaggtggtccttgggaatttggaaattacctatgtgcagaggaattatgatctttccttcttaaagaccatccaggaggtggctggttatgtcctcattgccctcaacacagtggagcgaattcctttggaaaacctgcagatcatcagaggaaatatgtactacgaaaattcctatgccttagcagtcttatctaactatgatgcaaataaaaccggactgaaggagctgcccatgagaaatttacaggaaatcctgcatggcgccgtgcggttcagcaacaaccctgccctgtgcaatgtggagagcatccagtggcgggacatagtcagcagtgactttctcagcaacatgtcgatggacttccagaaccacctgggcagctgccaaaagtgtgatccaagctgtcccaatgggagctgctggggtgcaggagaggagaactgccagaaactgaccaaaatcatctgtgcccagcagtgctccgggcgctgccgtggcaagtcccccagtgactgctgccacaaccagtgtgctgcaggctgcacaggcccccgggagagcgactgcctggtctgccgcaaattccgagacgaagccacgtgcaaggacacctgccccccactcatgctctacaaccccaccacgtaccagatggatgtgaaccccgagggcaaatacagctttggtgccacctgcgtgaagaagtgtccccgtaattatgtggtgacagatcacggctcgtgcgtccgagcctgtggggccgacagctatgagatggaggaagacggcgtccgcaagtgtaagaagtgcgaagggccttgccgcaaagtgtgtaacggaataggtattggtgaatttaaagactcactctccataaatgctacgaatattaaacacttcaaaaactgcacctccatcagtggcgatctccacatcctgccggtggcatttaggggtgactccttcacacatactcctcctctggatccacaggaactggatattctgaaaaccgtaaaggaaatcacagggtttttgctgattcaggcttggcctgaaaacaggacggacctccatgcctttgagaacctagaaatcatacgcggcaggaccaagcaacatggtcagttttctcttgcagtcgtcagcctgaacataacatccttgggattacgctccctcaaggagataagtgatggagatgtgataatttcaggaaacaaaaatttgtgctatgcaaatacaataaactggaaaaaactgtttgggacctccggtcagaaaaccaaaattataagcaacagaggtgaaaacagctgcaaggccacaggccaggtctgccatgccttgtgctcccccgagggctgctggggcccggagcccagggactgcgtctcttgccggaatgtcagccgaggcagggaatgcgtggacaagtgcaaccttctggagggtgagccaagggagtttgtggagaactctgagtgcatacagtgccacccagagtgcctgcctcaggccatgaacatcacctgcacaggacggggaccagacaactgtatccagtgtgcccactacattgacggcccccactgcgtcaagacctgcccggcaggagtcatgggagaaaacaacaccctggtctggaagtacgcagacgccggccatgtgtgccacctgtgccatccaaactgcacctacggatgcactgggccaggtcttgaaggctgtccaacgaatgggcctaagatcccgtccatcgccactgggatggtgggggccctcctcttgctgctggtggtggccctggggatcggcctcttcatgcgaaggcgccacatcgttcggaagcgcacgctgcggaggctgctgcaggagagggagcttgtggagcctcttacacccagtggagaagctcccaaccaagctctcttgaggatcttgaaggaaactgaattcaaaaagatcaaagtgctgggctccggtgcgttcggcacggtgtataagggactctggatcccagaaggtgagaaagttaaaattcccgtcgctatcaaggaattaagagaagcaacatctccgaaagccaacaaggaaatcctcgatgaagcctacgtgatggccagcgtggacaacccccacgtgtgccgcctgctgggcatctgcctcacctccaccgtgcagctcatcacgcagctcatgcccttcggctgcctcctggactatgtccgggaacacaaagacaatattggctcccagtacctgctcaactggtgtgtgcagatcgcaaagggcatgaactacttggaggaccgtcgcttggtgcaccgcgacctggcagccaggaacgtactggtgaaaacaccgcagcatgtcaagatcacagattttgggctggccaaactgctgggtgcggaagagaaagaataccatgcagaaggaggcaaagtgcctatcaagtggatggcattggaatcaattttacacagaatctatacccaccagagtgatgtctggagctacggggtgaccgtttgggagttgatgacctttggatccaagccatatgacggaatccctgccagcgagatctcctccatcctggagaaaggagaacgcctccctcagccacccatatgtaccatcgatgtctacatgatcatggtcaagtgctggatgatagacgcagatagtcgcccaaagttccgtgagttgatcatcgaattctccaaaatggcccgagacccccagcgctaccttgtcattcagggggatgaaagaatgcatttgccaagtcctacagactccaacttctaccgtgccctgatggatgaagaagacatggacgacgtggtggatgccgacgagtacctcatcccacagcagggcttcttcagcagcccctccacgtcacggactcccctcctgagctctctgagtgcaaccagcaacaattccaccgtggcttgcattgatagaaatgggctgcaaagctgtcccatcaaggaagacagcttcttgcagcgatacagctcagaccccacaggcgccttgactgaggacagcatagacgacaccttcctcccagtgcctgaatacataaaccagtccgttcccaaaaggcccgctggctctgtgcagaatcctgtctatcacaatcagcctctgaaccccgcgcccagcagagacccacactaccaggacccccacagcactgcagtgggcaaccccgagtatctcaacactgtccagcccacctgtgtcaacagcacattcgacagccctgcccactgggcccagaaaggcagccaccaaattagcctggacaaccctgactaccagcaggacttctttcccaaggaagccaagccaaatggcatctttaagggctccacagctgaaaatgcagaatacctaagggtcgcgccacaaagcagtgaatttattggagcaggtaccgcgggcccgggatccaccggtgccaccatgacttcgaaagtttatgatccagaacaaaggaaacggatgataactggtccgcagtggtgggccagatgtaaacaaatgaatgttcttgattcatttattaattattatgattcagaaaaacatgcagaaaatgctgttatttttttacatggtaacgcggcctcttcttatttatggcgacatgttgtgccacatattgagccagtagcgcggtgtattataccagaccttattggtatgggcaaatcaggcaaatctggtaatggttcttataggttacttgatcattacaaatatcttactgcatggtttgaacttcttaatttaccaaagaagatcatttttgtcggccatgattggggtgcttgtttggcatttcattatagctatgagcatcaagataagatcaaagcaatagttcacgctgaaagtgtagtagatgtgattgaatcatgggatgaatggcctgatattgaagaagatattgcgttgatcaaatctgaagaaggagaaaaaatggttttggagaataacttcttcgtggaaaccatgttgccatcaaaaatcatgagaaagttagaaccagaagaatttgcagcatatcttgaaccattcaaagagaaaggtgaagttcgtcgtccaacattatcatggcctcgtgaaatcccgttagtaaaaggtggtaaacctgacgttgtacaaattgttaggaattataatgcttatctacgtgcaagtgatgatttaccaaaaatgtttattgaatcggacccaggattcttttccaatgctattgttgaaggtgccaagaagtttcctaatactgaatttgtcaaagtaaaaggtcttcatttttcgcaagaagatgcacctgatgaaatgggaaaatatatcaaatcgttcgttgagcgagttctcaaaaatgaacaataa

SEQ ID NO: 226 - protein, 1532 aa, Homo sapiens [sequence omitted]

SEQ ID NO: 227 - DNA, 29 bp, Homo sapiens
  EGFR oligonucleotide
cagcggctagcgcgatgcgaccctccggg

SEQ ID NO: 228 - DNA, 35 bp, Homo sapiens
  EGFR oligonucleotide
cagctggtacctgctccaataaattcactgctttg

SEQ ID NO: 229 - DNA, 1275 bp, Homo sapiens
  Coding sequence for SHCP46
atgggacctggggtttcctacttggttcggtacatgggctgtgtggaggtcttacagtcaatgcgagcccttgacttcaatacccggactcaggtcaccagggaggccatcagtttggtgtgtgaagctgtgcctggtgccaaaggggcgacaaggaggagaaagccttgtagccgcccactcagctccatcctggggaggagtaacctgaagtttgctggaatgccaatcactctcactgtatctaccagcagccttaacctcatggcagccgactgcaaacagatcattgccaaccatcacatgcaatctatctctttcgcgtccggtggggatccggacacagctgagtatgttgcctatgttgccaaagaccctgtgaatcagagagcctgccatatcctggagtgtcctgaagggcttgctcaggatgtcatcagcaccatcgggcaggcctttgagttgcgcttcaaacagtatctcaggaatccaccgaagctggtcaccccccatgacaggatggctggctttgatggctcagcttgggatgaggaggaagaagagccccctgaccatcagtactacaatgactttccagggaaggaaccccctcttggtggggtggtagatatgaggcttcgggaaggggctgctcgacccactctgcctagtgcccagatgtccagccacttgggagctacactgcctatagggcagcatgctgcaggagaccatgaagtccgtaaacagatgttgcctccgccgccttgcccaggcagagaactcttcgatgacccctcctatgtcaacatccagaatctagacaaggcccggcaggctgggggtggggctgggcccccaaatccttctcttaatggcagtgcaccccgagacctttttgacatgaagccctttgaagatgcacttcgggtgccacccccaccgcagtccatgtccatggctgagcagctgcaaggggagccctggttccacgggaagctgagccggagggaggccgaggcgctgctgcagctcaatggtgacttcttggtgcgagagagcacgaccacgcctggccagtatgtgctcactggcctgcagagtgggcagcccaagcacttgctgctggtggaccctgaaggtgtggttcggacaaaggatcaccgctttgagagtgtcagtcacctgatcagctaccacatggacaatcacttgcccatcatctctgcgggcagcgaactgtgcctacagcaacccgtggatcggaaagtgtga

SEQ ID NO: 230 - protein, 424 aa, Homo sapiens
  Amino acid sequence of SHCP46
MGPGVSYLVRYMGCVEVLQSMRALDFNTRTQVTREAISLVCEAVPGAKGATRRRKPCSRPLSSILGRSNLKFAGMPITLTVSTSSLNLMAADCKQIIANHHMQSISFASGGDPDTAEYVAYVAKDPVNQRACHILECPEGLAQDVISTIGQAFELRFKQYLRNPPKLVTPHDRMAGFDGSAWDEEEEEPPDHQYYNDFPGKEPPLGGVVDMRLREGAARPTLPSAQMSSHLGATLPIGQHAAGDHEVRKQMLPPPPCPGRELFDDPSYVNIQNLDKARQAGGGAGPPNPSLNGSAPRDLFDMKPFEDALRVPPPPQSMSMAEQLQGEPWFHGKLSRREAEALLQLNGDFLVRESTTTPGQYVLTGLQSGQPKHLLLVDPEGVVRTKDHRFESVSHLISYHMDNHLPIISAGSELCLQQPVDRKV

SEQ ID NO: 231 - DNA, 3144 bp, Homo sapiens
  Coding sequence for STAT5A-GFP2
atggcgggctggatccaggcccagcagctgcagggagacgcgctgcgccagatgcaggtgctgtacggccagcacttccccatcgaggtccggcactacttggcccagtggattgagagccagccatgggatgccattgacttggacaatccccaggacagagcccaagccacccagctcctggagggcctggtgcaggagctgcagaagaaggcggagcaccaggtgggggaagatgggtttttactgaagatcaagctggggcactacgccacgcagctccagaaaacatatgaccgctgccccctggagctggtccgctgcatccggcacattctgtacaatgaacagaggctggtccgagaagccaacaattgcagctctccggctgggatcctggttgacgccatgtcccagaagcaccttcagatcaaccagacatttgaggagctgcgactggtcacgcaggacacagagaatgagctgaagaaactgcagcagactcaggagtacttcatcatccagtaccaggagagcctgaggatccaagctcagtttgcccagctggcccagctgagcccccaggagcgtctgagccgggagacggccctccagcagaagcaggtgtctctggaggcctggttgcagcgtgaggcacagacactgcagcagtaccgcgtggagctggccgagaagcaccagaagaccctgcagctgctgcggaagcagcagaccatcatcctggatgacgagctgatccagtggaagcggcggcagcagctggccgggaacggcgggccccccgagggcagcctggacgtgctacagtcctggtgtgagaagttggccgagatcatctggcagaaccggcagcagatccgcagggctgagcacctctgccagcagctgcccatccccggcccagtggaggagatgctggccgaggtcaacgccaccatcacggacattatctcagccctggtgaccagcacattcatcattgagaagcagcctcctcaggtcctgaagacccagaccaagtttgcagccaccgtacgcctgctggtgggcgggaagctgaacgtgcacatgaatcccccccaggtgaaggccaccatcatcagtgagcagcaggccaagtctctgcttaaaaatgagaacacccgcaacgagtgcagtggtgagatcctgaacaactgctgcgtgatggagtaccaccaagccacgggcaccctcagtgcccacttcaggaacatgtcactgaagaggatcaagcgtgctgaccggcggggtgcagagtccgtgacagaggagaagttcacagtcctgtttgagtctcagttcagtgttggcagcaatgagcttgtgttccaggtgaagactctgtccctacctgtggttgtcatcgtccacggcagccaggaccacaatgccacggctactgtgctgtgggacaatgcctttgctgagccgggcagggtgccatttgccgtgcctgacaaagtgctgtggccgcagctgtgtgaggcgctcaacatgaaattcaaggccgaagtgcagagcaaccggggcctgaccaaggagaacctcgtgttcctggcgcagaaactgttcaacaacagcagcagccacctggaggactacagtggcctgtccgtgtcctggtcccagttcaacagggagaacttgccgggctggaactacaccttctggcagtggtttgacggggtgatggaggtgttgaagaagcaccacaagccccactggaatgatggggccatcctaggttttgtgaataagcaacaggcccacgacctgctcatcaacaagcccgacgggaccttcttgttgcgctttagtgactcagaaatcgggggcatcaccatcgcctggaagtttgactccccggaacgcaacctgtggaacctgaaaccattcaccacgcgggatttctccatcaggtccctggctgaccggctgggggacctgagctatctcatctatgtgtttcctgaccgccccaaggatgaggtcttctccaagtactacactcctgtgctggctaaagctgttgatggatatgtgaaaccacagatcaagcaagtggtccctgagtttgtgaatgcatctgcagatgctgggggcagcagcgccacgtacatggaccaggccccctccccagctgtgtgcccccaggctccctataacatgtacccacagaaccctgaccatgtactcgatcaggatggagaattcgacctggatgagaccatggatgtggccaggcacgtggaggaactcttacgccgaccaatggacagtcttgactcccgcctctcgccccctgccggtcttttcacctctgccagaggctccctctcaaagcttgcggtaccgcgggcccgggatccaccggtcgccaccatggtgagcaagggcgaggagctgttcaccggggtggtgcccatcctggtcgagctggacggcgacgtaaacggccacaagttcagcgtgtccggcgagggcgagggcgatgccacctacggcaagctgaccctgaagttcatctgcaccaccggcaagctgcccgtgccctggcccaccctcgtgaccaccctgagctacggcgtgcagtgcttcagccgctaccccgaccacatgaagcagcacgacttcttcaagtccgccatgcccgaaggctacgtccaggagcgcaccatcttcttcaaggacgacggcaactacaagacccgcgccgaggtgaagttcgagggcgacaccctggtgaaccgcatcgagctgaagggcatcgacttcaaggaggacggcaacatcctggggcacaagctggagtacaactacaacagccacaacgtctatatcatggccgacaagcagaagaacggcatcaaggtgaacttcaagatccgccacaacatcgaggacggcagcgtgcagctcgccgaccactaccagcagaacacccccatcggcgacggccccgtgctgctgcccgacaaccactacctgagcacccagtccgccctgagcaaagaccccaacgagaagcgcgatcacatggtcctgctggagttcgtgaccgccgccgggatcactctcggcatggacgagctgtacaagtaa

SEQ ID NO: 232 - protein, 1047 aa, Homo sapiens [sequence omitted]

SEQ ID NO: 233 - DNA, 32 bp, Homo sapiens
  STAT5A oligonucleotide
gaacgagatctgccatggcgggctggatccag

SEQ ID NO: 234 - DNA, 31 bp, Homo sapiens
  STAT5A oligonucleotide
aacataagctttgagagggagcctctggcag

What is claimed is:

1. A method of evaluating whether a test compound functions as a ligand for a receptor tyrosine kinase, the method comprising:
(i) providing a cell comprising a receptor tyrosine kinase and a second protein, wherein said receptor tyrosine kinase comprises a bioluminescent donor moiety and said second comprises a fluorescent acceptor moiety, and wherein said second protein is found within close physical distance to said receptor tyrosine kinase if said test compound is a ligand for said receptor tyrosine kinase;
(ii) contacting said cell with a test compound; and
(iii) determining whether said receptor tyrosine kinase and said second protein interact in the presence of said test compound.

2. A method of evaluating whether a test compound functions as a ligand for a receptor tyrosine kinase, said method comprising:
(i) providing an cell comprising a receptor tyrosine kinase and a second protein, wherein said receptor tyrosine kinase comprises a bioluminescent donor moiety and said second protein comprises a fluorescent acceptor moiety, wherein said receptor tyrosine kinase and second protein are within close physical distance to each other;
(ii) contacting said cell with a test compound, wherein if said test compound is a ligand for said receptor tyrosine kinase, said receptor tyrosine kinase and said second protein will dissociate such that they are no longer within close physical distance to each other; and
(iii) detecting the interaction between said receptor tyrosine kinase and said second protein.

3. The method of claim 1 or 2, wherein the bioluminescent donor moiety is a luciferase.

4. The method of claim 3, wherein the luciferase is Renilla luciferase.

5. The method of claim 1 or claim 2, wherein the fluorescent acceptor moiety is a GFP moiety.

6. The method of claim 5, wherein the GFP moiety is GFP2.

7. The method of claim 1 or claim 2, wherein the fluorescent acceptor moiety is a YFP moiety.

8. The method of claim 1 or claim 2, wherein the fluorescent acceptor moiety is a CFP moiety.

9. The method of claim 1, wherein the determination step comprises calculating the ratio of light emissions from the fluorescent acceptor moiety and the bioluminescent donor moiety.

10. The method of claim 1, wherein the second protein is a signaling protein that mediates receptor tyrosine kinase signal transduction.

11. The method of claim 2, wherein the second protein is a protein that mediates receptor tyrosine kinase function.

12. The method of claim 10, wherein said signaling protein comprises an amino acid sequence selected from the group consisting of SEQ ID NOs: 2, 4, 6, 8, 10, 12, 14, 16, 18, 20, 22, 24, 26, 28, 30, 32, 34, 36, 38, 40, 42, 44, 46, 48, 50, and 52.

13. The method of claim 10, wherein said signaling protein comprises an amino acid sequence having at least 70% amino acid identity to an amino acid sequence selected from the group consisting of SEQ ID NOs: 2, 4, 6, 8, 10, 12, 14, 16, 18, 20, 22, 24, 26, 28, 30, 32, 34, 36, 38, 40, 42, 44, 46, 48, 50, and 52, wherein said signaling protein retains the ability to interact with a cognate receptor tyrosine kinase.

14. The method of claim 10, wherein said signaling protein comprises at least 5 consecutive amino acids of an amino acid sequence selected from the group consisting of SEQ ID NOs: 2, 4, 6, 8, 10, 12, 14, 16, 18, 20, 22, 24, 26, 28, 30, 32, 34, 36, 38, 40, 42, 44, 46, 48, 50, and 52, wherein said signaling protein retains the ability to interact with a cognate receptor tyrosine kinase.

15. The method of claim 1 or claim 2, wherein said receptor tyrosine kinase comprises an amino acid sequence selected from the group consisting of SEQ ID NOs: 110, 112, 114, 116, 118, 120, 122, 124, 126, 128, 130, 132, 134, 136, 138, 140, 142, 144, 146, 148, 150, 152, 154, 156, 158, 160, 162, 162, 164, 166, 168, 170, 172, 174, 176, 178, 180, 182, 184, 186, 188, 190, 192, 194, 196, 198, 200, 202, 204, 206, 208, 210, 212, 214, 216, 218, 220, 222, 224, or 226.

16. The method of claim 1 or claim 2, wherein said receptor tyrosine kinase comprises an amino acid sequence having at least 70% identity to an amino acid sequence selected from the group consisting of SEQ ID NOs: 110, 112, 114, 116, 118, 120, 122, 124, 126, 128, 130, 132, 134, 136, 138, 140, 142, 144, 146, 148, 150, 152, 154, 156, 158, 160, 162, 162, 164, 166, 168, 170, 172, 174, 176, 178, 180, 182, 184, 186, 188, 190, 192, 194, 196, 198, 200, 202, 204, 206, 208, 210, 212, 214, 216, 218, 220, 222, 224, and 226, and wherein said receptor tyrosine kinase retains the ability to mediate ligand binding and signal transduction.

17. The method of claim 1 or claim 2, wherein said receptor tyrosine kinase comprises at least 5 consecutive amino acids of an amino acid sequence selected from the group consisting of SEQ ID NOs: 110, 112, 114, 116, 118, 120, 122, 124, 126, 128, 130, 132, 134, 136, 138, 140, 142, 144, 146, 148, 150, 152, 154, 156, 158, 160, 162, 162, 164, 166, 168, 170, 172, 174, 176, 178, 180, 182, 184, 186, 188, 190, 192, 194, 196, 198, 200, 202, 204, 206, 208, 210, 212, 214, 216, 218, 220, 222, 224, or 226, and wherein said receptor tyrosine kinase retains the ability to mediate ligand binding and signal transduction.

18. The method of claim 1 or claim 2, wherein the method utilizes bioluminescence resonance energy transfer (BRET) technology.

19. A method of evaluating whether a test compound functions as a ligand for a receptor tyrosine kinase, the method comprising:
(i) providing a cell comprising a receptor tyrosine kinase and a second protein, wherein said receptor tyrosine kinase comprises a fluorescent donor moiety and said second comprises a fluorescent acceptor moiety, and wherein said second protein is found within close physical distance to said receptor tyrosine kinase if said test compound is a ligand for said receptor tyrosine kinase;
(ii) contacting said cell with a test compound; and
(iii) determining whether said receptor tyrosine kinase and said second protein interact in the presence of said test compound

20. A method of evaluating whether a test compound functions as a ligand for a receptor tyrosine kinase, said method comprising:
(i) providing an cell comprising a receptor tyrosine kinase and a second protein, wherein said receptor tyrosine kinase comprises a fluorescent donor moiety and said second protein comprises a fluorescent acceptor moiety, wherein said receptor tyrosine kinase and second protein are within close physical distance to each other;
(ii) contacting said cell with a test compound, wherein if said test compound is a ligand for said receptor tyrosine kinase, said receptor tyrosine kinase and said second protein will dissociate such that they are no longer within close physical distance to each other; and
(iii) detecting the interaction between said receptor tyrosine kinase and said second protein.

21. The method of claim 19 or 20, wherein said receptor tyrosine kinase is a fusion protein comprising a tyrosine kinase fused to said fluorescent donor moiety.

22. The method of claim 19, wherein the determination step comprises calculating the ratio of light emissions from the fluorescent acceptor moiety and the fluorescent donor moiety.

23. The method of claim 19 or 20, wherein the second protein is a signaling protein that mediates receptor tyrosine kinase signal transduction.

24. The method of claim 23, wherein said signaling protein comprises an amino acid sequence selected from the group consisting of SEQ ID NOs: 2, 4, 6, 8, 10, 12, 14, 16, 18, 20, 22, 24, 26, 28, 30, 32, 34, 36, 38, 40, 42, 44, 46, 48, 50, and 52.

25. The method of claim 23, wherein said signaling protein comprises an amino acid sequence having at least 70% amino acid identity to an amino acid sequence selected from the group consisting of SEQ ID NOs: 2, 4, 6, 8, 10, 12, 14, 16, 18, 20, 22, 24, 26, 28, 30, 32, 34, 36, 38, 40, 42, 44, 46, 48, 50, and 52, wherein said signaling protein retains the ability to interact with a cognate receptor tyrosine kinase.

26. The method of claim 23, wherein said signaling protein comprises at least 5 consecutive amino acids of an amino acid sequence selected from the group consisting of SEQ ID NOs: 2, 4, 6, 8, 10, 12, 14, 16, 18, 20, 22, 24, 26, 28, 30, 32, 34, 36, 38, 40, 42, 44, 46, 48, 50, and 52, wherein said signaling protein retains the ability to interact with a cognate receptor tyrosine kinase.

27. The method of claim 19 or 20, wherein said receptor tyrosine kinase comprises an amino acid sequence selected from the group consisting of SEQ ID NOs: 110, 112, 114, 116, 118, 120, 122, 124, 126, 128, 130, 132, 134, 136, 138, 140, 142, 144, 146, 148, 150, 152, 154, 156, 158, 160, 162, 162, 164, 166, 168, 170, 172, 174, 176, 178, 180, 182, 184, 186, 188, 190, 192, 194, 196, 198, 200, 202, 204, 206, 208, 210, 212, 214, 216, 218, 220, 222, 224, or 226.

28. The method of claim 19 or 20, wherein said receptor tyrosine kinase comprises an amino acid sequence having at least 70% identity to an amino acid sequence selected from the group consisting of SEQ ID NOs: 110, 112, 114, 116, 118, 120, 122, 124, 126, 128, 130, 132, 134, 136, 138, 140, 142, 144, 146, 148, 150, 152, 154, 156, 158, 160, 162, 162, 164, 166, 168, 170, 172, 174, 176, 178, 180, 182, 184, 186, 188, 190, 192, 194, 196, 198, 200, 202, 204, 206, 208, 210, 212, 214, 216, 218, 220, 222, 224, and 226, and wherein said receptor tyrosine kinase retains the ability to mediate ligand binding and signal transduction.

29. The method of claim 19 or 20, wherein said receptor tyrosine kinase comprises at least 5 consecutive amino acids of an amino acid sequence selected from the group consisting of SEQ ID NOs: 110, 112, 114, 116, 118, 120, 122, 124, 126, 128, 130, 132, 134, 136, 138, 140, 142, 144, 146, 148, 150, 152, 154, 156, 158, 160, 162, 162, 164, 166. 168, 170, 172, 174, 176, 178, 180, 182, 184, 186, 188, 190, 192, 194, 196, 198, 200, 202, 204, 206, 208, 210, 212, 214, 21 6, 218, 220, 222, 224, or 226, and wherein said receptor tyrosine kinase retains the ability to mediate ligand binding and signal transduction.

30. The method of claim 19 or 20, wherein the method utilizes fluorescent resonance energy transfer (FRET) technology.

31. A method of assessing the effect of a test compound on the activity of a receptor tyrosine kinase comprising:
(iv) providing a cell expressing one or more receptor tyrosine kinases and one or more second proteins, wherein said receptor tyrosine kinase comprises a bioluminescent donor moiety and said second protein comprises a fluorescent acceptor moiety, and wherein at least one of said receptor tyrosille kinases or second proteins is expressed from a nucleic acid which has been introduced into said cell;
(v) contacting said cell with said test compound; and
(vi) determining whether said test compound influences the activity of said receptor tyrosine kinase.

32. The method of claim 31 wherein said determining step comprises determining whether said test compound is an agonist.

33. The method of claim 31 wherein said determining step comprises determining whether said test compound is an antagonist.

34. The method of claim 31 wherein said determining step comprises determining whether said test compound is an inverse agonist.

35. The method of claim 31 wherein said determining step comprises determining whether said test compound is a selective modulator.

36. The method of claim 31 wherein the test compound is a naturally occurring compound.

37. The method of claim 31, wherein the test compound is a synthetic compound.

38. An isolated cell comprising a receptor tyrosine kinase and a second protein, wherein said receptor tyrosine kinase comprises a bioluminescent donor moiety fusion protein and wherein said second protein comprises a fluorescent acceptor moiety fusion protein, and wherein modulation of the activity of said receptor tyrosine kinase affects the protein protein interactions between said receptor tyrosine kinase and said second protein.

39. An isolated cell comprising a receptor tyrosine kinase and a second protein, wherein said receptor tyrosine kinase comprises a fluorescent donor moiety fusion protein and wherein said second protein comprises a fluorescent acceptor moiety fusion protein, wherein said fluorescent donor moiety and said fluorescent acceptor moiety are different, and wherein modulation of the activity of said receptor tyrosine kinase affects the protein protein interactions between said receptor tyrosine kinase and said second protein.

40. The cell of claim 38, wherein said receptor tyrosine kinase is a fusion protein comprising a receptor tyrosine kinase fused to a bioluminescent protein.

41. The cell of claim 40, wherein said wherein said bioluminescent donor moiety is a luciferase.

42. The cell of claim 41, wherein said luciferase is Renilla luciferase.

43. The cell of claim 38 or 39, wherein said fluorescent acceptor moiety is a GFP moiety.

44. The cell of claim 43, wherein said GFP moiety is GFP2.

45. The cell of claim 38 or claim 39, wherein said fluorescent acceptor moiety is a YFP moiety.

46. The cell of claim 38 or claim 39, wherein said fluorescent acceptor moiety is a CFP moiety.

47. The cell of claim 38 or claim 39, wherein said second protein is a signaling protein that mediates receptor tyrosine kinase signal transduction.

48. The cell of claim 47, wherein said signaling protein comprises an amino acid sequence selected from the group consisting of SEQ ID NOs: 2, 4, 6, 8, 10, 12, 14, 16, 18, 20, 22, 24, 26, 28, 30, 32, 34, 36, 38, 40, 42, 44, 46, 48, 50, and 52.

49. The cell of claim 47, wherein said signaling protein comprises an amino acid sequence having at least 70% amino acid identity to an amino acid sequence selected from the group consisting of SEQ ID NOs: 2, 4, 6, 8, 10, 12, 14, 16, 18, 20, 22, 24, 26, 28, 30, 32, 34, 36, 38, 40, 42, 44, 46, 48, 50, and 52, wherein said signaling protein retains the ability to interact with a cognate receptor tyrosine kinase.

50. The cell of claim 47, wherein said signaling protein comprises at least 5 consecutive amino acids of an amino acid sequence selected from the group consisting of SEQ ID NOs: 2, 4, 6, 8, 10, 12, 14, 16, 18, 20, 22, 24, 26, 28, 30, 32, 34, 36, 38, 40, 42, 44, 46, 48, 50, and 52, wherein said signaling protein retains the ability to interact with a cognate receptor tyrosine kinase.

51. The cell of claim 38 or claim 39, wherein said receptor tyrosine kinase comprises an amino acid sequence selected from the group consisting of SEQ ID NOs: 110, 112, 114, 116, 118, 120, 122, 124, 126, 128, 130, 132, 134, 136, 138, 140, 142, 144, 146, 148, 150, 152, 154, 156, 158, 160, 162, 162, 164, 166, 168, 170, 172, 174, 176, 178, 180, 182, 184, 186, 188, 190, 192, 194, 196, 198, 200, 202, 204, 206, 208, 210, 212, 214, 216, 218, 220, 222, 224, or 226.

52. The cell of claim 38 or claim 39, wherein said receptor tyrosine kinase comprises an amino acid sequence having at least 70% identity to an amino acid sequence selected from the group consisting of SEQ ID NOs: 110, 112, 114, 116, 118, 120, 122, 124, 126, 128, 130, 132, 134, 136, 138, 140, 142, 144, 146, 148, 150, 152, 154, 156, 158, 160, 162, 162, 164, 166, 168, 170, 172, 174, 176, 178, 180, 182, 184, 186, 188, 190, 192, 194, 196, 198, 200, 202, 204, 206, 208, 210, 212, 214, 216, 218, 220, 222, 224, or 226, and wherein said receptor tyrosine kinase retains the ability to mediate ligand binding and signal transduction.

53. The cell of claim 38 or claim 39, wherein said receptor tyrosine kinase comprises at least 5 consecutive amino acids of an amino acid sequence selected from the group consisting of SEQ ID NOs: 110, 112, 114, 116, 118, 120, 122, 124, 126, 128, 130, 132, 134, 136, 138, 140, 142, 144, 146, 148, 150, 152, 154, 156, 158, 160, 162, 162, 164, 166, 168, 170, 172, 174, 176, 178, 180, 182, 184, 186, 188, 190, 192, 194, 196, 198, 200, 202, 204, 206, 208, 210, 212, 214, 216, 218, 220, 222, 224, or 226, and wherein said receptor tyrosine kinase retains the ability to mediate ligand binding and signal transduction.

54. The cell of claim 38 or claim 39, wherein said isolated cell is a eukaryotic cell.

55. The cell of claim 38 or claim 39, wherein said isolated cell is a mammalian cell.

56. A method of evaluating whether a test compound functions as a ligand for a receptor tyrosine kinase, said method comprising:
(i) providing an isolated cell comprising a receptor tyrosine kinase fused to a bioluminescent donor moiety and a second protein fused to a fluorescent acceptor moiety,
(ii) contacting the cell with a substrate, wherein the bioluminescent donor moiety on said receptor tyrosine kinase emits light at a first wavelength in the presence of said substrate, wherein the energy emitted from the bioluminescent donor moiety is transferred to said fluorescent acceptor moiety on said second protein when said fluorescent acceptor moiety is in close proximity to said bioluminescent donor moiety, and wherein said fluorescent acceptor moiety emits light at a second wavelength when said bioluminescent donor moiety transfers energy to said fluorescent acceptor moiety;
(iii) contacting said cell with a test compound; and
(iv) measuring the emission of light at said first wavelength and at said second wavelength; and

57. A method of making a pharmaceutical composition comprising
(i) performing the method of any one of claims 1 or 19;
(ii) identifying a test compound that is an agonist of said receptor tyrosine kinase; and
(iii) combining said test compound with a pharmaceutically acceptable carrier.

58. A method of making a pharmaceutical composition comprising
(i) performing the method of any one of claims 1 or 19;
(ii) identifying a test compound that is an antagonist of said receptor tyrosine kinase; and
(iii) combining said test compound with a pharmaceutically acceptable carrier.

59. A method of making a pharmaceutical comprising
(i) performing the method of any one of claims 1 or 19;
(ii) identifying a test compound that is an inverse agonist of said receptor tyrosine kinase; and
(iii) combining said test compound with a pharmaceutically acceptable carrier.

60. A method of making a pharmaceutical comprising
(i) performing the method of any one of claims 1 or 19;
(ii) identifying a test compound that is an selective modulator of said receptor tyrosine kinase; and
(iii) combining said test compound with a pharmaceutically acceptable carrier

61. A pharmaceutical composition comprising a compound identified by any one of claims 1 or 19, and a physiologically acceptable carrier, diluent, or excipient, or a combination thereof.

62. The method of claim 10, wherein said signaling protein comprises an amino acid selected from the group consisting of SEQ ID NOs: 2, 26, and 230.

63. The method of claim 1 or 2, wherein said receptor tyrosine kinase comprises the amino acid sequence of SEQ ID NO: 110.

64. The cell of claim 47, wherein said signaling protein comprises an amino acid selected from the group consisting of SEQ ID NOs: 2, 26, and 230.

65. The cell of claim 38 or 39, wherein said receptor tyrosine kinase comprises the amino acid sequence of SEQ ID NO: 110.
